(19) United States
(12) Patent Application Publication
(10) Pub. No.: US 2025/0075234 A1
(43) Pub. Date: Mar. 6, 2025

(54) COMPOSITIONS AND METHODS FOR BASE EDITING KINASE GENES

(71) Applicant: The Trustees of Columbia University in the City of New York, New York, NY (US)

(72) Inventor: Neil Vasan, Long Island City, NY (US)

(21) Appl. No.: 18/824,298

(22) Filed: Sep. 4, 2024

Related U.S. Application Data
(60) Provisional application No. 63/580,802, filed on Sep. 6, 2023.

(51) Int. Cl. C12N 15/90; C12N 9/22; C12N 9/78; C12N 15/11; C12Q 1/6876

(52) U.S. Cl. CPC C12N 15/907; C12N 9/22; C12N 9/78; C12N 15/11; C12Q 1/6876; C12Y 305/04001; C12Y 305/04002; C07K 2319/00; C12N 2310/20; C12Q 2600/136; C12Q 2600/158

(57) ABSTRACT

A method of modifying a nucleotide in a kinase gene on a double-stranded DNA molecule in a mammalian cell, the method comprising introducing to the cell a composition comprising a guide RNA molecule comprising a spacer sequence portion and a fusion protein comprising a Clustered Regularly Interspaced Short Palindromic Repeats (CRISPR) nuclease and a base editing enzyme.

### CROSS-REFERENCE TO RELATED APPLICATIONS

[0001] This application claims the benefit of U.S. Provisional Application No. 63/580,802 filed Sep. 6, 2023, the content of which is hereby incorporated by reference.

[0002] Throughout this application, various publications are referenced, including referenced in parenthesis. The disclosures of all publications mentioned in this application in their entireties are hereby incorporated by reference into this application in order to provide additional description of the art to which this invention pertains and of the features in the art which can be employed with this invention.

### REFERENCE TO SEQUENCE LISTING

[0003] This application incorporates-by-reference nucleotide sequences which are present in the file named “240904_92259-A_Sequence_Listing_AWG.xml”, which is 8,845,130 bytes in size, and which was created on Sep. 3, 2024 in the IBM-PC machine format, having an operating system compatibility with MS-Windows, which is contained in the XML file filed Sep. 4, 2024 as part of this application.

### REFERENCE TO LARGE TABLES

[0004] This application incorporates-by-reference a large table which is present in the file named “240904_92259-A_Catalytically_Inactive_Kinase_Guides_Table_AWG.txt”, which is 1,945 kilobytes in size, and which was created on Aug. 22, 2024 in the IBM-PC machine format, having an operating system compatibility with MS-Windows, which is contained in the text file filed Sep. 4, 2024 as part of this application.

LENGTHY TABLES
The patent application contains a lengthy table section. A copy of the table is available in electronic form from the USPTO web site (https://seqdata.uspto.gov/?pageRequest=docDetail&DocID=US20250075234A1). An electronic copy of the table will also be available from the USPTO upon request and payment of the fee set forth in 37 CFR 1.19(b)(3).

### TECHNICAL FIELDS

[0005] This application relates to compositions and methods for base editing any kinase in the human genome. The compositions and methods may be used to generate screens and cell lines for use in identifying treatments for a variety of conditions, including cancer. Specifically, kinase proteins are druggable enzymes that regulate nearly all aspects of cell signaling in cancer cells, but the ideal kinase targets or kinase drug combinations to kill various types of cancers have not been established. A platform to base edit all 556 human kinases and remove their enzyme activity at physiologic levels is described herein, and may be utilized to decipher the functional effects of how kinase inhibition alters cell growth, drug response, and gene expression which results in accelerated kinase target validation and enable drug discovery. In addition to their uses in screening and cell line generation, the compositions and methods themselves may also be used to treat a condition of a subject, including cancer.

### BACKGROUND OF THE INVENTION

[0006] The human genome contains 556 kinase genes, commonly called the “kinome.” Kinases are enzymes that regulate nearly all aspects of cell signaling and their dysregulation leads to excess cell proliferation, a hallmark of cancer. Kinases are one of the most important targets in precision oncology, but the ideal kinase targets or kinase drug combinations for most cancers have not been established. Determining the cellular consequences of turning off kinase enzymes has immense potential to transform our understanding of kinases and kinase inhibitors.

### SUMMARY OF THE INVENTION

[0007] According to an embodiment of the present invention, there is provided a method of method of modifying a nucleotide in a kinase gene on a double-stranded DNA molecule in a mammalian cell so as to modify kinase catalytic activity, the method comprising introducing to the cell a composition comprising a guide RNA molecule comprising a spacer sequence portion comprising any one of SEQ ID NOs: 1-10012 and a fusion protein comprising a Clustered Regularly Interspaced Short Palindromic Repeats (CRISPR) nuclease and a base editing enzyme. Preferably, the kinase gene is modified such that the cell expresses a catalytically inactivated form of the kinase having a mutation in its active site.

[0008] According to another embodiment of the present invention, there is provided a composition comprising a guide RNA molecule comprising a spacer sequence portion, wherein the spacer sequence portion comprises any one of SEQ ID NOs: 1-10012.

[0009] According to another embodiment of the present invention, there is provided a composition comprising a CRISPR guide RNA library, the library comprising a plurality of guide RNA molecules, or a plurality of DNA molecules encoding the guide RNA molecules, wherein each guide RNA molecule comprises a spacer sequence portion, and wherein the library comprises each sequence of SEQ ID NOs: 1-10012 among the spacer sequence portions of the plurality of guide RNA molecules.

### BRIEF DESCRIPTION OF THE DRAWINGS

[0010] FIG. 1: Base-editing enzymes to enable drug discovery. Base-editing methods described herein may be used to surgically mutate catalytic amino acids and turn off enzyme catalysis (kinome shown here) in cancer cells, to establish causal relationships between enzyme function and cancer phenotypes that can be therapeutically exploited.

[0011] FIGS. 2A-2B: Base editor validation. (FIG. 2A) ABE8e-SpRY-Cas9 base editor construct. Specifically, a lentiviral plasmid construct comprised of 1) TadA** or ABE8e (V106W) (See M. F. Richter et al., Nat Biotechnol. 38, 883-891 (2020)), 2) SpRY-Cas9, a “near PAM-less” Cas9 derivative (Sec R. T. Walton, K. A. Christie, M. N. Whittaker, B. P. Kleinstiver, Science. 368, 290-296 (2020)), 3) eGFP flanked by P2A sites, and 4) a blasticidin resistance cassette. (FIG. 2B) ABE8e-SpRY-Cas9 is a functional base editor, with 93% loss of CD47 in T47D cells, as detected by flow cytometry (light blue and green peaks), using a gRNA mutating CD47 splice sites.

[0012] FIGS. 3A-3C: Kinase protein engineering showing (FIG. 3A) kinase catalytic motifs, (FIG. 3B) consequences of adenine base-editing on catalytic amino acids, and (FIG. 3C) identified catalytic sites for 556 kinases in the human genome.

[0013] FIGS. 4A-4B: Base editing kinase catalytic function in T47D cells. (FIG. 4A) Experimental schematic. ABE, adenine base editor. (FIG. 4B) Log fold change of control and essential guides.

[0014] FIG. 5: Base editing enzyme catalytic function in T47D cells. Volcano plot of pilot base editing experiment in T47D breast cancer cells of kinases. Statistically significant gRNAs showing lethality are in table at bottom. Essential catalytic dead guides, red. Other enzyme guides, black. Negative control guides, gray. Guides labeled by catalytic site and numbered. LFC, log fold change.

[0015] FIGS. 6A-6C: Confirmation of base editing in cells for selected PLK4 catalytically dead guide. (FIG. 6A) Pie chart showing proportion of modified reads. (FIG. 6B) Edited sequences and proportions, showing on target catalytic lysine edits and additional edits within the editing window. (FIG. 6C) Nucleotide substitution frequency.

[0016] FIG. 7: Base-editing the cancer kinome to enable drug discovery. The approaches described herein bring mutagenesis to genomic scales by utilizing base-editing methods to surgically mutate catalytic amino acids and turn off kinome catalysis in cancer cells, to establish causal relationships between kinase function and cancer phenotypes that can be therapeutically exploited.

[0017] FIGS. 8A-8B: Adenine base-editing schematic showing (FIG. 8A) adenine base-editing mechanism and (FIG. 8B) cloned plasmid featuring an adenine base editor that can bind to any sequence for site-specific editing.

[0018] FIGS. 9A-9C: Kinase protein engineering showing (FIG. 9A) kinase catalytic motifs, (FIG. 9B) consequences of adenine base-editing on catalytic amino acids, and (FIG. 9C) identified catalytic sites for 556 kinases in the human genome.

[0019] FIG. 10: Kinome base-editing gRNA library targeting catalytic residues (kinase-dead) and splice sites (knock-out), and controls for base editing all 556 human kinases.

[0020] FIG. 11: Phosphoproteomic validation of on-target effects of kinase-dead mutants based on a global atlas of substrate specificities for the human kinome (See Needham, EJ et al. Sci Signal 12 (2019)).

[0021] FIG. 12: Schematic for kinase catalytic base-editing in pooled cellular assays. ABE=adenine base editor.

[0022] FIG. 13: Drugging strategies based on kinase-dead and kinase knock-out effects on cancer cell lethality.

[0023] FIG. 14: Kinase-druggable gene interdependency network using single-cell RNA sequencing to determine the druggable genes whose expression is altered by kinase catalytic inhibition.

[0024] FIG. 15: Overview of base editing screen design. Target cells are first transduced with ABE construct (see FIG. 2A) and selected with blasticidin and then transduced with guide RNA library at low MOI followed by puromycin selection. After that D0 cell sample collected and cells maintained for additional 2 weeks before collecting second D14 sample. Genomic DNA was isolated from D0 and D14 samples followed by next generation sequencing to get the guide counts. Guide counts were compared between D14 and D0 samples. If gRNA was depleted it indicated that kinase inhibition decreases cell growth and gRNA enrichment indicated that kinase inhibition increases growth.

[0025] FIGS. 16A-16B: Screen quality control data. Next generation sequencing of guide counts were trimmed. (FIG. 16A) Log 2 counts for all guides from each sample replicate. (FIG. 16B) Table showing reads mapped and statistics for each replicate. The Gini Index describes the read count distribution. A smaller value indicates more evenness of the count distribution. Next generation sequencing of guide counts trimmed using following packages: Trimming of adapter sequences: cutadapt, see M. Martin, EMBnet.journal. 17, 10-12 (2011); and Guide counts, normalization, and Robust Rank Aggregation (RRA) analysis: MAGeCK-VISPR, see W. Li et al., Genome Biol. 16, 281 (2015) and Wang et al., Nat Protoc. 14, 756-780 (2019).

[0026] FIG. 17: Replicate correlations. Correlations between replicates for t0 and t14 samples. Graphs made in R using ggscatter, R=Pearson correlation coefficient.

[0027] FIGS. 18A-18B: Screen quality and controls. (FIG. 18A) Log 2 fold changes for guides by guide group (average of three (3) replicates). Ctrl_NT=non-targeting guides, Ctrl_ESS=splice site guides targeting common essential genes (non-kinase), Ctrl_NONESS=splice site guides targeting non-essential genes, Ctrl_EW=guides without adenines in ABE editing window, Kinase_Cat=guides targeting catalytic residues in kinases, Kinase_splice=guides targeting splice sites in kinases. (FIG. 18B) Statistical significances between all of the guide groups calculated using Brown-Forsythe and Welch ANOVA test with Games-Howell multiple test correction.

[0028] FIG. 19: Screen data. Volcano plot showing kinase hits. Each dot corresponds to one catalytic site residue (average of all guides targeting that site from three (3) replicates). Cut-off values indicated with grey dotted lines: FDR<10%, LFC<−0.6 or >0.6.

### DETAILED DESCRIPTION

[0029] In order to facilitate an understanding of the subject matter disclosed herein, each of the following terms, as used herein, shall have the meaning set forth below, except as expressly provided otherwise herein.

[0030] Unless otherwise defined, all technical and/or scientific terms used herein have the same meaning as commonly understood by one of ordinary skill in the art to which the invention pertains. Although methods and materials similar or equivalent to those described herein can be used in the practice or testing of embodiments of the invention, exemplary methods and/or materials are described below. In case of conflict, the patent specification, including definitions, will control. In addition, the materials, methods, and examples are illustrative only and are not intended to be necessarily limiting.

[0031] It should be understood that the terms “a” and “an” as used above and elsewhere herein refer to “one or more” of the enumerated components. It will be clear to one of ordinary skill in the art that the use of the singular includes the plural unless specifically stated otherwise. Therefore, the terms “a,” “an” and “at least one” are used interchangeably in this application.

[0032] For purposes of better understanding the present teachings and in no way limiting the scope of the teachings, unless otherwise indicated, all numbers expressing quantities, percentages or proportions, and other numerical values used in the specification and claims, are to be understood as being modified in all instances by the term “about.” Accordingly, unless indicated to the contrary, the numerical parameters set forth in the following specification and attached claims are approximations that may vary depending upon the desired properties sought to be obtained. At the very least, each numerical parameter should at least be construed in light of the number of reported significant digits and by applying ordinary rounding techniques.

[0033] Unless otherwise stated, adjectives such as “substantially” and “about” modifying a condition or relationship characteristic of a feature or features of an embodiment of the invention, are understood to mean that the condition or characteristic is defined to within tolerances that are acceptable for operation of the embodiment for an application for which it is intended. Unless otherwise indicated, the word “or” in the specification and claims is considered to be the inclusive “or” rather than the exclusive or, and indicates at least one of, or any combination of items it conjoins.

[0034] In the description and claims of the present application, each of the verbs, “comprise,” “include” and “have” and conjugates thereof, are used to indicate that the object or objects of the verb are not necessarily a complete listing of components, elements or parts of the subject or subjects of the verb. Other terms as used herein are meant to be defined by their well-known meanings in the art.

[0035] As used herein, all numerical ranges provided are intended to expressly include at least the endpoints and all numbers that fall between the endpoints of ranges.

[0036] As used herein, the term “targeting sequence” or “targeting molecule” in the context of guide RNA molecules refers a nucleotide sequence or molecule comprising a nucleotide sequence that is capable of hybridizing to a specific target sequence, e.g., the targeting sequence has a nucleotide sequence which is at least partially complementary to the sequence being targeted along the length of the targeting sequence. The targeting sequence or targeting molecule may be part of a guide RNA molecule that can form a complex with a CRISPR nuclease, either alone or in combination with another RNA molecule (e.g. a tracrRNA molecule), with the targeting sequence serving as the targeting portion of the CRISPR complex. When the guide RNA molecule having the targeting sequence is present contemporaneously with the CRISPR molecule, the guide RNA molecule, alone or in combination with an additional one or more RNA molecules (e.g. a tracrRNA molecule), is capable of targeting the CRISPR nuclease to the specific target sequence. As non-limiting example, a spacer sequence portion of a CRISPR RNA (crRNA) molecule or single-guide RNA (sgRNA) molecule may serve as a targeting molecule.

[0037] The term “targets” as used herein in the context of guide RNA molecules, refers to preferentially hybridizing a targeting sequence of a targeting molecule to a nucleic acid molecule having a targeted nucleotide sequence. It is understood that the term “targets” encompasses variable hybridization efficiencies, such that there is preferential targeting of the nucleic acid molecule comprising the targeted nucleotide sequence. It is understood that where a guide RNA molecule targets a sequence, a complex of the guide RNA molecule and a CRISPR nuclease targets the sequence for binding and/or nuclease activity.

[0038] The “spacer sequence portion” of a guide RNA molecule refers to a nucleotide sequence that is capable of hybridizing to a specific target DNA sequence, e.g., the spacer sequence portion has a nucleotide sequence which is partially or fully complementary to the DNA sequence being targeted along the length of the spacer sequence portion. The entire length of the spacer sequence portion may be complementary, preferably fully or mostly complementary, to the DNA sequence being targeted along the length of the spacer sequence portion. The spacer sequence portion may be part of a guide RNA molecule that can form a complex with a CRISPR nuclease, with the spacer sequence portion serving as the DNA-targeting portion of the complex. When a guide RNA molecule having the spacer sequence portion is present contemporaneously with a CRISPR molecule, alone or in combination with an additional one or more RNA molecules (e.g. a tracrRNA molecule), the guide RNA molecule is capable of targeting the CRISPR nuclease to the specific target DNA sequence. Accordingly, a CRISPR complex can be formed by direct binding of a guide RNA molecule having the spacer sequence portion to a CRISPR nuclease or by binding of the guide RNA molecule having the spacer sequence portion and an additional one or more RNA molecules to the CRISPR nuclease. Each possibility represents a separate embodiment. A spacer sequence portion can be custom designed to target any desired sequence and satisfy a PAM requirement of a CRISPR nuclease. In some embodiments, a spacer sequence portion may comprise any one of SEQ ID NOs: 1-10012. In some embodiments, a spacer sequence portion comprises any one of SEQ ID NOs: 1-10012 and additional nucleotides, e.g. additional nucleotides fully complimentary to a nucleotide or sequence of nucleotides adjacent to the 3′ end of the target sequence, 5′ end of the target sequence, or both. In some embodiments, a spacer sequence portion comprises a portion of any one of SEQ ID NOs: 1-10012 with 1, 2, 3, 4, or 5 nucleotides removed from one or both ends of the sequence. In some embodiments, the spacer sequence portion comprises a sequence that is the same as, or differs by no more than 1, 2, 3, 4, or 5 nucleotides from, a spacer sequence portion of any one of SEQ ID NOs: 1-10012.

[0039] Spacer sequence portions which target regions encoding catalytically active sites of kinases are provided in the large table in the file named “240904_92259-A_Catalytically_Inactive_Kinase_Guides_Table_AWG.txt”. The targeted kinase gene is listed in column 1. A name for each spacer sequence portion, which includes the targeted kinase catalytic site motif, is listed in column 2. The chromosome of the targeted kinase is provided in column 3. The start and end positions of a codon encoding an amino acid present in the targeted kinase motif, which can be modified using the spacer sequence portion, is provided in columns 4 and 5, respectively. For example, the space sequence portion named “AAK1_DFG_1” may be used to modify a nucleotide in the AAK1 gene which encodes the aspartic acid residue (D) in the DFG catalytic site motif of the AAK1 kinase. The strand of the genome containing a sequence corresponding to the spacer sequence is provided in column 6. The EnsemblP_ID of the kinase is provided in column 7. Spacer sequence portions which may be used according to the methods described herein to modify a region encoding a kinase catalytic site are provided in column 8, along with their respective SEQ ID NOs.

[0040] Accordingly, a molecule comprising a “spacer sequence portion” is a type of targeting molecule. Throughout this application, the terms “guide molecule,” “RNA guide molecule,” “guide RNA molecule,” and “gRNA molecule” are synonymous with a molecule comprising a spacer sequence portion. Guide RNA molecules and their uses as sgRNA molecules or in crRNA:tracrRNA complexes are well-understood in the art. See, for example, Jinek et al. “A programmable dual-RNA-guided DNA endonuclease in adaptive bacterial immunity” Science, 17; 337(6096): 816-21 (2012).

[0041] A skilled artisan will appreciate that a guide RNA molecule can be engineered to bind to a desired target sequence in a genome by commonly known methods in the art. Specifically, an engineered guide RNA molecule may be designed such as to associate with a target genomic DNA sequence of interest in proximity to a protospacer adjacent motif (PAM), e.g., a PAM compatible with the CRISPR nuclease utilized with the guide RNA molecule. As non-limiting examples, a guide RNA molecule may be engineered to target a sequence next to a PAM of NGG or NAG, wherein “N” is any nucleobase, for use with Streptococcus pyogenes Cas9 WT (SpCas9); or next to a PAM of NR, NRN, or NYN, wherein N is any nucleobase, R is A or G and Y is C or T, for use with an SpRY variant of SpCas9. Additional CRISPR nuclease orthologues from various species, and variants thereof, are known in the art, as well as their PAM requirements. See for example, Ren et al., “PAM-less plant genome editing using a CRISPR-SpRY toolbox” Nature Plants, 7, 25-33 (2021); Ye et al. “Can SpRY recognize any PAM in human cells?” J. Zheijiang Univ. Sci. B., 23 (5): 382-391 (2022); and Liang et al. “SpG and SpRY variants expand the CRISPR toolbox for genome editing in zebrafish” Nature Communications, 13, 3421 (2022).

[0042] Accordingly, guide RNA molecules described herein are designed to form complexes in conjunction with one or more different CRISPR nucleases and to target polynucleotide sequences of interest utilizing one or more different PAM sequences respective to the CRISPR nuclease utilized.

[0043] As a non-limiting example, a CRISPR nuclease derived from Streptococcus pyogenes, Streptococcus thermophilus, Streptococcus sp., Staphylococcus aureus, Neisseria meningitidis, Treponema denticola, Nocardiopsis dassonvillei, Streptomyces pristinaespiralis, Streptomyces viridochromogenes, Streptomyces viridochromogenes, Streptosporangium roseum, Streptosporangium roseum, Alicyclobacillus acidocaldarius, Bacillus pseudomycoides, Bacillus selenitireducens, Exiguobacterium sibiricum, Lactobacillus delbrueckii, Lactobacillus salivarius, Microscilla marina, Burkholderiales bacterium, Polaromonas naphthalenivorans, Polaromonas sp., Crocosphaera watsonii, Cyanothece sp., Microcystis aeruginosa, Synechococcus sp., Acetohalobium arabaticum, Ammonifex degensii, Caldicelulosiruptor becscii, Candidatus Desulforudis, Clostridium botulinum, Clostridium difficile, Finegoldia magna, Natranaerobius thermophilus, Pelotomaculumthermopropionicum, Acidithiobacillus caldus, Acidithiobacillus ferrooxidans, Allochromatium vinosum, Marinobacter sp., Nitrosococcus halophilus, Nitrosococcus watsoni, Pseudoalteromonas haloplanktis, Ktedonobacter racemifer, Methanohalobium evestigatum, Anabaena variabilis, Nodularia spumigena, Nostoc sp., Arthrospira maxima, Arthrospira platensis, Arthrospira sp., Lyngbya sp., Microcoleus chthonoplastes, Oscillatoria sp., Petrotoga mobilis, Thermosipho africanus, Acaryochloris marina, or any species which encodes a CRISPR nuclease with a known PAM sequence may be utilized in embodiments of the invention.

[0044] The following embodiments and examples (including details thereof) are set forth to aid in an understanding of the subject matter of this disclosure but are not intended to, and should not be construed to, limit in any way the invention that is claimed.

[0045] According to embodiments of the present invention, there is provided a method of modifying a nucleotide in a kinase gene on a double-stranded DNA molecule in a mammalian cell, the method comprising introducing to the cell a composition comprising a guide RNA molecule comprising a spacer sequence portion and a fusion protein comprising a Clustered Regularly Interspaced Short Palindromic Repeats (CRISPR) nuclease and a base editing enzyme. Preferably, a nucleotide within a region encoding an active site of the kinase is modified such that the kinase expressed from the modified gene is catalytically inactive. Accordingly, the method results in a modified kinase gene that encodes a catalytically inactive kinase. Thus, a full-length, catalytically inactive kinase may be expressed from the modified kinase gene.

[0046] In some embodiments, the base editing enzyme is an adenine deaminase.

[0047] In some embodiments, the base editing enzyme is ABE8e.

[0048] In some embodiments, the base editing enzyme is a cytosine deaminase, and the fusion protein preferably further comprises an inhibitor of uracil DNA glycosylase (UGI).

[0049] In some embodiments, the CRISPR nuclease is a nickase and effects a single-strand break in a strand of the double-stranded DNA molecule, preferably in a strand that the spacer sequence portion of the guide RNA molecule is hybridized to.

[0050] In some embodiments, the CRISPR nuclease is a nickase comprising an inactive HNH domain.

[0051] In some embodiments, the CRISPR nuclease is catalytically inactive.

[0052] In some embodiments, the CRISPR nuclease is a SpCas9, SaCas9, SpRY-Cas9, or an orthologue and/or variant thereof.

[0053] In some embodiments, the CRISPR nuclease is SpRY-Cas9.

[0054] In some embodiments, the base editing enzyme is N-terminal of the CRISPR nuclease in the fusion protein.

[0055] In some embodiments, the fusion protein comprises a linker portion between the CRISPR nuclease and the base editing enzyme, preferably wherein the linker portion is a rigid or flexible linker.

[0056] In some embodiments, the kinase gene is selected from the group consisting of AAK1, AATK, ABL1, ABL2, ACAD10, ACAD11, ACVR1, ACVR1B, ACVR1C, ACVR2A, ACVR2B, ACVRL1, ADCK1, ADCK2, ADCK5, AKT1, AKT2, AKT3, ALK, ALPK1, ALPK2, ALPK3, AMHR2, ANKK1, ARAF, ATM, ATR, AURKA, AURKB, AURKC, AXL, BLK, BMP2K, BMPR1A, BMPR1B, BMPR2, BMX, BRAF, BRSK1, BRSK2, BTK, BUB1, BUB1B, CASMK1, CASMK1D, CAMK1G, CAMK2A, CAMK2B, CAMK2D, CAMK2G, CAMK4, CAMKK1, CAMKK2, CAMKV, CASK, CDC42BPA, CDC42BPB, CDC42BPG, CDC7, CDK1, CDK10, CDK11A, CDK11B, CDK12, CDK13, CDK14, CDK15, CDK16, CDK17, CDK18, CDK19, CDK2, CDK20, CDK3, CDK4, CDK5, CDK6, CDK7, CDK8, CDK9, CDK1, CDKL2, CDKL3, CDKL4, CDKL5, CHEK1, CHEK2, CHKA, CHKB, CHUK, CILK1, CIT, CLK1, CLK2, CLK3, CLK4, COQ8A, COQ8B, CSF1R, CSK, CSNK1A1, CSNK1A1L, CSNK1D, CSNK1E, CSNK1G1, CSNK1G2, CSNK1G3, CSNK2A1, CSNK2A2, CSNK2A3, DAPK1, DAPK2, DAPK3, DCLK1, DCLK2, DCLK3, DDR1, DDR2, DMPK, DSTYK, DYRK1A, DYRK1B, DYRK2, DYRK3, DYRK4, EEF2K, EGFR, EIF2AK1, EIF2AK2, EIF2AK3, EIF2AK4, EPHA1, EPHA2, EPHA3, EPHA4, EPHA5, EPHA6, EPHA7, EPHA8, EPHB1, EPHB2, EPHB3, EPHB4, ERBB2, ERBB3, ERBB4, ERN1, ERN2, ETNK1, ETNK2, FAM20A, FAM20B, FAM20C, FER, FES, FGFR1, FGFR2, FGFR3, FGFR4, FGR, FLT1, FLT3, FLT4, FN3K, FN3KRP, FRK, FYN, GAK, GRK1, GRK2, GRK3, GRK4, GRK5, GRK6, GRK7, GSK3A, GSK3B, GUCY2C, GUCY2D, GUCY2F, HASPIN, HCK, HIPK1, HIPK2, HIPK3, HIPK4, HUNK, HYKK, IGF1R, IKBKB, IKBKE, ILK, INSR, INSRR, IP6K1, IP6K2, IP6K3, IPMK, IPPK, IRAK1, IRAK2, IRAK3, IRAK4, ITK, ITPKA, ITPKB, ITPKC, JAK1, JAK2, JAK3, KALRN, KDR, KIT, KSR1, KSR2, LATS1, LATS2, LCK, LIMK1, LIMK2, LMTK2, LMTK3, LRRK1, LRRK2, LTK, LYN, MAK, MAP2K1, MAP2K2, MAP2K3, MAP2K4, MAP2K5, MAP2K6, MAP2K7, MAP3K1, MAP3K10, MAP3K11, MAP3K12, MAP3K13, MAP3K14, MAP3K15, MAP3K19, MAP3K2, MAP3K20, MAP3K21, MAP3K3, MAP3K4, MAP3K5, MAP3K6, MAP3K7, MAP3K8, MAP3K9, MAP4K1, MAP4K2, MAP4K3, MAP4K4, MAP4K5, MAPK1, MAPK10, MAPK11, MAPK12, MAPK13, MAPK14, MAPK15, MAPK3, MAPK4, MAPK6, MAPK7, MAPK8, MAPK9, MAPKAPK2, MAPKAPK3, MAPKAPK5, MARK1, MARK2, MARK3, MARK4, MAST1, MAST2, MAST3, MAST4, MASTL, MATK, MELK, MERTK, MET, MINK1, MKNK1, MKNK2, MLKL, MOK, MOS, MST1R, MTOR, MUSK, MYLK, MYLK2, MYLK3, MYLK4, MYO3A, MYO3B, NEK1, NEK10, NEK11, NEK2, NEK3, NEK4, NEK5, NEK6, NEK7, NEK8, NEK9, NIM1K, NLK, NPR1, NPR2, NRK, NTRK1, NTRK2, NTRK3, NUAK1, NUAK2, OBSCN, OXSR1, PAK1, PAK2, PAK3, PAK4, PAK5, PAK6, PASK, PBK, PDGFRA, PDGFRB, PDIK1L, PDPK1, PEAK1, PEAK3, PHKG1, PHKG2, PI4K2A, PI4K2B, PI4KA, PI4KB, PIK3C2A, PIK3C2B, PIK3C2G, PIK3C3, PIK3CA, PIK3CB, PIK3CD, PIK3CG, PIK3R4, PIKFYVE, PIM1, PIM2, PIM3, PINK1, PIP4K2A, PIP4K2B, PIP4K2C, PIP5K1A, PIP5K1B, PIP5K1C, PIP5KL1, PKDCC, PKMYT1, PKN1, PKN2, PKN3, PLK1, PLK2, PLK3, PLK4, PNCK, POMK, PRAG1, PRKAA1, PRKAA2, PRKACA, PRKACB, PRKACG, PRKCA, PRKCB, PRKCD, PRKCE, PRKCG, PRKCH, PRKCI, PRKCQ, PRKCZ, PRKD1, PRKD2, PRKD3, PRKDC, PRKG1, PRKG2, PRKX, PRPF4B, PSKH1, PSKH2, PTK2, PTK2B, PTK6, PTK7, PXK, RAF1, RET, RIOK1, RIOK2, RIOK3, RIPK1, RIPK2, RIPK3, RIPK4, RNASEL, ROCK1, ROCK2, ROR1, ROR2, ROS1, RPS6KA1, RPS6KA2, RPS6KA3, RPS6KA4, RPS6KA5, RPS6KA6, RPS6KB1, RPS6KB2, RPS6KC1, RPS6KL1, RSKR, RYK, SBK1, SBK2, SBK3, SELENOO, SGK1, SGK2, SGK3, SIK1, SIK2, SIK3, SLK, SMG1, SNRK, SPEG, SRC, SRMS, SRPK1, SRPK2, SRPK3, STK10, STK11, STK16, STK17A, STK17B, STK24, STK25, STK26, STK3, STK31, STK32A, STK32B, STK32C, STK33, STK35, STK36, STK38, STK38L, STK39, STK4, STK40, STKLD1, STYK1, SYK, TAOK1, TAOK2, TAOK3, TBCK, TBK1, TEC, TEK, TESK1, TESK2, TEX14, TGFBR1, TGFBR2, TIE1, TLK1, TLK2, TNIK, TNK1, TNK2, TNNI3K, TP53RK, TRIB1, TRIB2, TRIB3, TRIO, TRPM6, TRPM7, TSSK1B, TSSK2, TSSK3, TSSK4, TSSK6, TTBK1, TTBK2, TTK, TTN, TXK, TYK2, TYRO3, UHMK1, ULK1, ULK2, ULK3, ULK4, VRK1, VRK2, VRK3, WEE1, WEE2, WNK1, WNK2, WNK3, WNK4, YES1, and ZAP70.

[0057] In some embodiments, the kinase gene is selected from the group consisting of ATM, PLK4, and CDK9.

[0058] In some embodiments, the base editing enzyme modifies a base of a nucleotide on a coding strand or a non-coding strand of the kinase gene.

[0059] In some embodiments, a CRISPR complex comprising the guide RNA molecule and the CRISPR nuclease displace a strand of the DNA molecule, wherein the base editing enzyme modifies a nucleotide base on the displaced strand, and wherein the modified nucleotide is on a coding strand or a non-coding strand of the kinase gene.

[0060] In some embodiments, a A:T to G:C conversion or a C:G to T:A conversion occurs in the double-stranded DNA molecule at the site of the modified nucleotide

[0061] In some embodiments, cellular DNA mismatch repair is induced by the nucleotide modification and a A:T to G:C conversion or a C:G to T:A conversion occurs in the double-stranded DNA molecule at the site of the modified nucleotide.

[0062] In some embodiments, the double-stranded DNA molecule is genomic DNA.

[0063] In some embodiments, the mammalian cell is a mouse cell, a non-human primate cell, or a human cell.

[0064] In some embodiments, the mammalian cell is a primary cell, a cancer cell, or an immortalized cell.

[0065] In some embodiments, the mammalian cell is a HAP1 leukemia cell, MDA-MB-231 (breast) cell, A375 (skin) cell, HT29 (colon) cell, A549 (lung) cell, MCF7 (breast) cell, or a T47D (breast) cell.

[0066] In some embodiments, the mammalian cell is a cancer cell obtained from a subject having breast cancer, estrogen receptor positive (ER+) breast cancer, triple-negative breast cancer (TNBC), colon cancer, prostate cancer, bladder cancer, soft-tissue sarcoma, an advanced lung cancer, lung cancer, non-small cell lung cancer, small cell lung cancer, mesothelioma, esophageal cancer, liver cancer, renal cell cancer, melanoma, skin cancer, basal cell skin cancer, squamous cell skin cancer, and squamous cell carcinoma of the head and neck, or leukemia.

[0067] In some embodiments, the modified cell expresses a full-length catalytically inactive form of the kinase encoded by the modified kinase gene.

[0068] In some embodiments, the modified kinase gene encodes a stable, catalytically inactive form of the kinase comprising an amino acid substitution in VAIK, HRD, or DFG motif.

[0069] In some embodiments, the lysine in a VAIK motif is substituted to glutamate, arginine, or glycine.

[0070] In some embodiments, the aspartate in a HRD or DFG motif is substituted to glycine.

[0071] In some embodiments, the spacer sequence portion comprises any one of SEQ ID NOs: 1-10012.

[0072] In some embodiments, the spacer sequence portion comprises SEQ ID NO: 6982.

[0073] In some embodiments, the guide RNA molecule is a single guide RNA (sgRNA) molecule.

[0074] In some embodiments, the guide RNA molecule is a CRISPR RNA (crRNA) molecule, and the composition further comprises a transactivating RNA (tracrRNA) molecule that hybridizes to a repeat sequence portion of the crRNA molecule to form a crRNA:tracrRNA complex.

[0075] In some embodiments, the sgRNA molecule or crRNA:tracrRNA complex are capable of forming a CRISPR complex with the CRISPR nuclease, and wherein the spacer portion of the guide RNA molecule in the CRIPSR complex hybridizes to a strand of the double-stranded DNA molecule.

[0076] In some embodiments, the guide RNA molecule and/or tracrRNA molecule are introduced to the cell by introducing a DNA polynucleotide encoding the guide RNA molecule and/or tracrRNA molecule.

[0077] In some embodiments, the guide RNA molecule and/or tracrRNA molecule are introduced by directly delivering the guide RNA molecule and/or tracrRNA molecule to the cell.

[0078] In some embodiments, the fusion molecule is introduced to the cell by introducing to the cell a polynucleotide encoding the fusion protein.

[0079] In some embodiments, the fusion protein is introduced to the cell by directly delivering the fusion protein to the cell.

[0080] In some embodiments, the fusion protein is introduced to the cell prior to the introduction of the guide RNA molecule.

[0081] In some embodiments, the fusion protein and the guide RNA molecule are introduced at the same time or substantially the same time.

[0082] In some embodiments, a CRISPR complex comprising the guide RNA molecule and the CRISPR nuclease is formed and directly introduced into the cell.

[0083] In some embodiments, the composition is introduced to a cell ex vivo, in vivo, or in vitro.

[0084] In some embodiments, the composition is introduced to a cell isolated from a tumour.

[0085] In some embodiments, the composition is introduced to a cell in a subject, preferably a human subject, more preferably to a tumour cell in a human subject.

[0086] According to embodiments of the present invention, there is provided a modified mammalian cell obtained by any one of the methods described herein. In some embodiments, a kinase gene has been modified in the modified mammalian cell such that the cell expresses a catalytically inactive form of the kinase, preferably such that an amino acid in the active site of the kinase has been altered relative to a wild-type form of the kinase.

[0087] According to embodiments of the present invention, there is provided a composition comprising a guide RNA molecule comprising a spacer sequence portion, wherein the spacer sequence portion comprises any one of SEQ ID NOs: 1-10012.

[0088] In some embodiments, the guide RNA molecule is a crRNA molecule or a sgRNA molecule.

[0089] In some embodiments, the guide RNA molecule is a crRNA molecule and the composition further comprises a tracrRNA molecule that hybridizes to a repeat sequence portion of the crRNA molecule to form a crRNA:tracrRNA complex.

[0090] In some embodiments, the composition further comprises a CRISPR nuclease or a fusion protein comprising a CRISPR nuclease and a base editing enzyme.

[0091] In some embodiments, the CRISPR nuclease is a nickase

[0092] In some embodiments, the CRISPR nuclease comprises an inactive HNH domain.

[0093] In some embodiments, the CRISPR nuclease is catalytically inactive.

[0094] In some embodiments, the CRISPR nuclease is a SpCas9, SaCas9, SpRY-Cas9, or an orthologue and/or variant thereof.

[0095] In some embodiments, the CRISPR nuclease is SpRY-Cas9.

[0096] In some embodiments, the composition further comprises a fusion protein comprising a CRISPR nuclease and a base editing enzyme.

[0097] In some embodiments, the base editing enzyme is N-terminal of the CRISPR nuclease in the fusion protein.

[0098] In some embodiments, the fusion protein comprises a linker portion between the CRISPR nuclease and the base editing enzyme, preferably wherein the linker portion is a rigid or flexible linker.

[0099] In some embodiments, the base editing enzyme is an adenine deaminase.

[0100] In some embodiments, the base editing enzyme is ABE8e.

[0101] In some embodiments, the base editing enzyme is a cytosine deaminase, and the fusion protein preferably further comprises an inhibitor of uracil DNA glycosylase (UGI).

[0102] In some embodiments, the composition is packaged in a viral delivery system, preferably a lentivirus or adeno-associated virus (AAV).

[0103] In some embodiments, the spacer sequence portion comprises SEQ ID NO: 6982.

[0104] According to embodiments of the present invention, there is provided any one of the compositions described herein for use in treating a condition in a subject, preferably wherein the condition is a cancer.

[0105] According to embodiments of the present invention, there is provided a method of treating a condition in a subject comprising delivering any one of the compositions described herein to the subject, preferably wherein the condition is a cancer.

[0106] According to embodiments of the present invention, there is provided a polynucleotide molecule encoding any of the guide RNA molecules, crRNA molecules, tracrRNA molecules, sgRNA molecules, CRISPR nucleases, and/or fusion proteins described herein.

[0107] According to embodiments of the present invention, there is provided a composition comprising a CRISPR guide RNA library, the library comprising a plurality of guide RNA molecules, or a plurality of DNA molecules encoding the guide RNA molecules, wherein each guide RNA molecule comprises a spacer sequence portion, and wherein the library comprises each sequence of SEQ ID NOs: 1-10012 among the spacer sequence portions of the plurality of guide RNA molecules.

[0108] In some embodiments, the library is packaged in a viral delivery system, preferably a lentivirus.

[0109] In some embodiments, the library comprises a plurality of DNA molecules encoding the guide RNA molecules.

[0110] In some embodiments, the DNA molecules are plasmids or viral vector molecules, preferably lentiviral vector molecules.

[0111] In some embodiments, the library comprises a plurality of DNA molecules encoding the guide RNA molecules, and each DNA molecule also encodes a fusion protein comprising a CRISPR nuclease and a base editing enzyme.

[0112] In some embodiments, the composition further comprises a fusion protein comprising a CRISPR nuclease and a base editing enzyme or a DNA molecule encoding the fusion protein comprising a CRISPR nuclease and a base editing enzyme.

[0113] In some embodiments, the CRISPR nuclease is a nickase.

[0114] In some embodiments, the CRISPR nuclease comprises an inactive HNH domain.

[0115] In some embodiments, the CRISPR nuclease is catalytically inactive.

[0116] In some embodiments, the CRISPR nuclease is a SpCas9, SaCas9, SpRY-Cas9, or an orthologue and/or variant thereof.

[0117] In some embodiments, the CRISPR nuclease is SpRY-Cas9.

[0118] In some embodiments, the composition further comprises a fusion protein comprising a CRISPR nuclease and a base editing enzyme.

[0119] In some embodiments, the base editing enzyme is N-terminal of the CRISPR nuclease in the fusion protein.

[0120] In some embodiments, the fusion protein comprises a linker portion between the CRISPR nuclease and the base editing enzyme, preferably wherein the linker portion is a rigid or flexible linker.

[0121] In some embodiments, the base editing enzyme is an adenine deaminase.

[0122] In some embodiments, the base editing enzyme is ABE8e.

[0123] In some embodiments, the base editing enzyme is a cytosine deaminase, and the fusion protein preferably further comprises an inhibitor of uracil DNA glycosylase (UGI).

[0124] According to embodiments of the present invention, there is provided a plurality of modified cells, wherein the cells are modified by introducing the any one of the compositions described herein to the cells.

[0125] In some embodiments, the fusion protein comprising a CRISPR nuclease and a base editing enzyme is expressed in the cell before or after the CRISPR guide RNA library is introduced.

[0126] In some embodiments, the cells are mammalian cells, non-human primate cells, or human cells.

[0127] In some embodiments, the cells are primary cells, cancer cells, or an immortalized cells.

[0128] In some embodiments, the cells are HAP1 leukemia cells, MDA-MB-231 (breast) cells, A375 (skin) cells, HT29 (colon) cells, A549 (lung) cells, MCF7 (breast) cells, or a T47D (breast) cells.

[0129] In some embodiments, the cells are cancer cells obtained from a subject having breast cancer, estrogen receptor positive (ER+) breast cancer, triple-negative breast cancer (TNBC), colon cancer, prostate cancer, bladder cancer, soft-tissue sarcoma, an advanced lung cancer, lung cancer, non-small cell lung cancer, small cell lung cancer, mesothelioma, esophageal cancer, liver cancer, renal cell cancer, melanoma, skin cancer, basal cell skin cancer, squamous cell skin cancer, and squamous cell carcinoma of the head and neck, or leukemia.

[0130] According to embodiments of the present invention, there is provided an isogenic cell line generated from a cell isolated from the plurality of modified cells.

[0131] According to embodiments of the present invention, there is provided a method of identifying a drug target for use in a combination therapy with a first treatment, the method comprising
[0132] i) exposing the plurality of modified cells to the first treatment;
[0133] ii) sequencing the spacer sequence portions in the plurality of cells, preferably at a time point 0.5-14 days after the exposure to the first treatment;
[0134] iii) determining if each spacer sequence portion was enriched, unchanged, or depleted;
[0135] iv) classifying a kinase as a catalytically growth-suppressive kinase if a spacer sequence portion targeting the kinase is enriched, and classifying a kinase as a catalytically essential kinase if a spacer sequence portion targeting the kinase is depleted; and
[0136] v) identifying a catalytically essential kinase as a drug target for use in a combination therapy with the first treatment.

[0137] According to embodiments of the present invention, there is provided a method of identifying a drug target, the method comprising
[0138] i) sequencing the spacer sequence portions in the plurality of modified cells, preferably at a time point 0.5-30 days after the introduction of the CRISPR guide RNA library to the plurality of cells;
[0139] ii) determining if each spacer sequence portion was enriched, unchanged, or depleted;
[0140] iii) classifying a kinase as a catalytically growth-suppressive kinase if a spacer sequence portion targeting the kinase is enriched, and classifying a kinase as a catalytically essential kinase if a spacer sequence portion targeting the kinase is depleted; and
[0141] iv) identifying a catalytically essential kinase as a drug target.

[0142] According to embodiments of the present invention, there is provided a method of identifying a drug target, the method comprising
[0143] i) sequencing the spacer sequence portions in the plurality of modified cells, preferably at a time point 0.5-30 days after the introduction of the CRISPR guide RNA library to the plurality of cells;
[0144] ii) performing single-cell RNA sequencing on a cell of the plurality of modified cells, measuring gene expression levels in the cell; and
[0145] iii) identifying a gene whose expression is altered relative to an unmodified cell as a drug target.

[0146] In some embodiments, the method further comprises selecting a treatment that affects the drug target,
[0147] wherein a kinase degrader molecule is selected as the treatment if
[0148] i) a first spacer sequence portion comprising any one of SEQ ID NOs: 1-10012 is enriched or unchanged; and
[0149] ii) a second spacer sequence portion which targets and knocks out the same kinase as targeted by the first spacer sequence portion of i) is depleted.

[0150] In some embodiments, the method further comprises selecting a treatment that affects the drug target,
[0151] wherein an active site kinase inhibitor is selected as the treatment if
[0152] i) a first spacer sequence portion comprising any one of SEQ ID NOs: 1-10012 is depleted; and
[0153] ii) a second spacer sequence portion which targets and knocks out the same kinase as targeted by the first spacer sequence portion of i) is enriched or unchanged.

[0154] In some embodiments, the method further comprises administering a treatment that affects the drug target to a subject.

[0155] In some embodiments, the plurality of modified cells are cancer cells and the treatment that affects the drug target is a cancer treatment.

[0156] According to embodiments of the present invention, there is provided a composition, method, or modified cell as characterized by one or more elements disclosed herein.

[0157] Disclosed herein are compositions and methods to perturb kinase catalysis and measure its effects on cancer cell function. More specifically, the use of cutting-edge base editing tools to precisely mutate amino acids necessary for enzyme catalysis in every human kinase across the kinome is demonstrated. This approach may be utilized to identify novel kinases for therapeutic targeting and act as a surrogate for small-molecule inhibition to enable drug discovery. Prior methods to perturb the kinome in cells use knock-out or knock-down approaches, which are crude tools that alter expression of the entire gene and do not necessarily translate to the effects of a small-molecule inhibitor.

[0158] The base editing approach to inactivate kinase catalysis as described herein solves two major issues that prevent existing mutagenesis and knock-in methods to both scale across the kinome and perform mutations at physiologic levels. Base editing can mutate hundreds of genes at physiologic levels in a pooled experiment due to its high editing efficiency. Disclosed herein is a base editing platform to selectively mutate individual catalytic amino acids in 556 kinases in cancer cells for pooled functional studies. As a case study, the platform was used in breast cancer cells, where multiple kinase inhibitors are standard therapies but where new treatments are urgently needed.

[0159] The base editing platform includes a base editor that can bind to any genomic sequence for site-specific editing, identification of catalytically necessary amino acids in every human kinase, a guide RNA library to edit amino acids resulting in kinase catalytic loss, and sophisticated proteomic strategies to prove on-target loss of kinase catalysis in cells.

[0160] The base editing platform is used to interrogate how kinase activity regulates 1) cancer cell growth, 2) sensitivity to targeted therapies, and 3) druggable gene expression. Notably, this platform will drastically compress the interval between kinase hit and lead discovery from a time scale of decades to years by identifying the optimal mechanisms to inhibit kinases, which is transformative for drug development and the design of combination therapies.

[0161] This platform is innovative conceptually, technically, and materially as it provides the first approach for precise, surgical inhibition of a large and diverse family of enzymes in a comprehensive fashion.

[0162] As a non-limiting example, the present technology provides compositions and methods for catalytically inactivating kinases. The compositions and methods may be used for generating stable cell lines, screening for new or improved treatments of a condition, or directly used to treat conditions themselves.

[0163] Notably, the compositions and methods described herein solve the problem of how to genetically and endogenously model kinase inhibition (and other enzyme inhibition) in cells.

[0164] As described herein, base editing is used to perform modifications of the kinome where amino acids that are necessary for catalytic activity of each kinase are selectively mutated. Other published technologies use base editing for therapeutic purposes (to edit mutant DNA that itself is causing a disease) or to model clinical variants found in patients. There are no technologies for high throughput modeling of endogenous enzyme inhibition (to mimic small molecule inhibition). The approach described herein utilizes pooled screens, providing an internal control to study enzyme inhibition and effects on cell growth (or other phenotypes). The advantage of the approach described herein is that it mimics enzyme inhibition (as a catalytic small molecule would) unlike knockdown/knockout approaches which remove the entire gene and do not recapitulate enzymatic inhibition.

[0165] Thus, possible applications for the invention include, but are not limited to, fast genetic screens to model effects of kinase inhibitor drugs (and inhibitors to other enzymes) in cells or in animal models.

[0166] Various other inventive aspects can be integrated or employed, as discussed infra.

[0167] While the invention has been particularly shown and described with reference to a preferred embodiment and various alternate embodiments, it will be understood by persons skilled in the relevant art that various changes in form and details can be made therein without departing from the spirit and scope of the invention.

[0168] All references cited herein are incorporated by reference to the same extent as if each individual publication, database entry (e.g. Genbank sequences or GeneID entries), patent application, or patent, was specifically and individually indicated to be incorporated by reference in its entirety, for all purposes. This statement of incorporation by reference is intended by Applicants, pursuant to 37 C.F.R. § 1.57 (b)(1), to relate to each and every individual publication, database entry (e.g. Genbank sequences or GeneID entries), patent application, or patent, each of which is clearly identified in compliance with 37 C.F.R. § 1.57 (b)(2), even if such citation is not immediately adjacent to a dedicated statement of incorporation by reference. The inclusion of dedicated statements of incorporation by reference, if any, within the specification does not in any way weaken this general statement of incorporation by reference. Citation of the references herein is not intended as an admission that the reference is pertinent prior art, nor does it constitute any admission as to the contents or date of these publications or documents.

[0169] Examples are provided below to facilitate a more complete understanding of the invention. The following examples illustrate the exemplary modes of making and practicing the invention. However, the scope of the invention is not limited to specific embodiments disclosed in these Examples, which are for purposes of illustration only.

### EXAMPLES

### Example 1—Base Editing Enzyme Catalytic Activities in Cells

### Background and Objective

[0170] There is no tool to study the effects of or model endogenous catalytic inhibition of enzyme classes at scale across the human genome/proteome. Development of such a tool would allow for the precise functional understanding of the effects of enzyme catalytic inhibition in cells, mimicking the effects of small molecule inhibitors, in various diseases such as cancer. Such a tool would compress the interval between enzyme hit and lead discovery from decades to years by identifying the optimal mechanisms to inhibit enzymes, transforming drug developments and design of combination therapies.

[0171] Current methods of studying enzyme inhibition are inefficient and limited by technological constraints. Traditional CRISPR and RNA knockout (KO) and knockdown (KD) methods do not capture pharmacological intervention and are inefficient for performing knock-ins. Genetic KO screens are imperfect tools because absence of a protein rarely mimics inhibition of an intact protein. For example, for some genes, KO mutants are not lethal but catalytic inactivating mutants cause cell lethality, and vice versa, due to competing functions of domains outside the enzymatic domain and upregulation of genes that compensate for enzymatic loss. Pharmacologic screens are imperfect tools: many enzymes lack potent inhibitors, and existing inhibitors can be promiscuous where off-target effects may drive a phenotype. These issues compromise the utility of drug screens to discover new druggable enzyme targets. Nominating an enzyme target and then proving that catalytic inhibition causes cell lethality can take years and significant resources. A genetic tool to selectively disable enzyme catalysis while retaining physiological protein levels would accelerate our understanding of enzyme function in cells by mimicking the effects of enzyme inhibitors.

[0172] Existing methods to turn off enzyme catalysis suffer from lack of both scalability and endogenous perturbation. Overexpressing mutated genes can model enzymatic inhibition, but data interpretation is confounded by nonphysiologic levels of mutant protein expression. CRISPR knock-in mutagenesis at endogenous genomic loci is extremely inefficient, requiring isolation of single cells. Using knock-in to inhibit all enzymes in a particular is unfeasible, as it would require thousands of arrayed experiments which would take decades for a single lab to complete. In contrast, new techniques such as base editing can efficiently install point mutations in genes at physiologic levels. Other groups have proven the feasibility of base editing to scan and mutate throughout a gene's primary sequence using tiling approaches but no one has ever developed the tools to use base editing for precise, surgical inhibition of a large and diverse family of enzymes in a comprehensive manner.

[0173] This technology is a pooled base editing platform that targets the entire class of human kinase enzymes (the kinome) at physiologic levels in cells, and selectively inhibits these enzymes at the genomic level with precise mutations that better capture the mechanisms of pharmacological inhibition. Using kinase family-specific libraries, this platform uses base editing to perform precise DNA edits that effectively inhibit enzymatic activity once translated in a way that captures well-defined and FDA-approved pharmacological mechanisms. This platform can be used in therapeutic discovery to study the selective inhibition of kinases on cell growth in proliferation in various cancers for fast nomination of therapeutic targets.

### Description

[0174] Compositions and methods described herein include cutting-edge base editing tools to precisely mutate amino acids necessary for enzyme catalysis in every enzyme member of the kinase class, and their use in analyzing how kinase catalysis regulates cancer cell function and identifying novel therapeutic targets to enable drug discovery (FIG. 1). Just as an engine is essential to keep a car running, catalysis is critical for enzyme function. If the engine is broken, the car is dead and will not run. Studying how a car performs in a complex system is best accomplished not by destroying the entire car and sorting through the rubble, but rather by altering specific parts, some of which are necessary for function (engine, tires) and others which are dispensable (color of the car). Analogously, for enzymes, KO and KD are crude tools that remove the entire gene, yielding insufficiently detailed or difficult to interpret information about enzyme cellular functions. Moreover, neither KO nor KD approaches necessarily translate to the effects of a small molecule inhibitor, and unsurprisingly have yielded few standard anticancer therapies. Therefore, studying how an enzyme functions in cells to enable drug discovery is best accomplished by altering its specific amino acids necessary for catalytic function, which will act as a surrogate for small molecule inhibition.

[0175] Current base editing tools cannot selectively turn off endogenous kinase catalytic activity in cells at scale. Described herein are compositions and methods to selectively mutate amino acids necessary for kinome catalysis to create a base editing platform, by 1) engineering an adenine base editor (ABE) that can bind to any gene sequence for site-specific editing; 2) identifying catalytically necessary amino acids for every human kinase; and 3) synthesizing a guide RNA (gRNA) library to edit catalytic amino acids and splice sites resulting in catalytic loss and whole gene loss:

[0176] Adenine base editor: Base editing creates precise point mutations from C→T or A→G in genomic DNA. Base editors are comprised of fusions between a Cas9 nickase and a cytosine or adenine deaminase^{1,2}. Upon binding to the target locus, base pairing between the gRNA molecule and target DNA strand displaces a small segment of DNA, forming an editing window that can be modified by the deaminase. Compared with CRISPR knock-in, base editing is much more efficient; does not require single-cell isolation, which can introduce artifacts; and is well suited to functionally assess thousands of gene variants in a single experiment³⁻⁵. Here, adenine base editing is used, which allows for mutation of all possible codons of the amino acids responsible for kinase catalysis, unlike cytosine base editing, which could mutate only a subset. Base editors require a protospacer adjacent motif (PAM) site (usually NGG) at 13-19 base pairs downstream of the targeted base for DNA binding. This critical limitation often prevents base editors from introducing a desired point mutation. Therefore, a base editor containing 1) ABE8e, an adenine deaminase associated with one of the highest editing efficiencies (˜40-80% for most of the sites tested)⁶; and 2) SpRY-Cas9, a Cas9 ortholog with greater target site flexibility (NGN, NAN, and, to a lesser extent, NCN and NTN PAMs) that can bind to any sequence for site-specific editing⁷ was generated (FIG. 2A). This plasmid was transduced to create a variety of stable cell lines for the experiments. Base editing was confirmed in T47D estrogen receptor positive (ER+) breast cancer cells using a CD47 gRNA targeting its own splice site which causes functional knockout⁸ (FIG. 2B).

[0177] Enzyme protein engineering: First, catalytically necessary amino acids in every human kinase were identified. The protein kinase fold is well-conserved, and almost every kinase contains three invariant amino acids located in canonical sequence motifs: 1) VAIK, whose lysine (K) coordinates the phosphates in ATP; 2) HRD, whose aspartate (D) is the catalytic base for the kinase reaction; and 3) DFG, whose aspartate (D) binds to magnesium ions necessary for ATP coordination⁹ (FIG. 3A). Mutations at any of these sites abrogate kinase activity⁹⁻¹⁴ and are used to model catalytically dead kinases in proteins, cells, and mice. Specifically, adenine base editing would result in amino acid mutations of K→(E/R/G) and D→G, which invert charge (K→E), eliminate charge (K→G, D→G), or increase size (K→R) (FIG. 3B). These mutations kill kinase activity because amino acids with charge inversion or elimination cannot perform ATP transfer chemistry, and amino acids with increased size (even with identical charge as K→R) cannot be sterically accommodated in the active site to coordinate ATP^{9-11,14}. Each of these motifs were identified in every human and mouse kinase using bioinformatic analysis of sequence alignments and located their amino acid and genomic coordinates (FIG. 3C).

[0178] Kinome gRNA library design: gRNA molecules were designed to edit catalytic residues in every human kinase. Specifically, gRNA molecules were designed to edit catalytic residues, targeting at least one site in ˜97% of kinases and two or three sites in ˜91% of kinases. Adenine base editing cannot create stop codons², necessitating an alternative approach to model total gene loss, so splice donor sites are also edited which leads to effective KO⁸. The entire human and mouse libraries contain ˜6,000 gRNAs each, with 5 kinase-dead and 5 kinase KO gRNAs on average for each kinase. The library was cloned into a lentiviral vector with puromycin resistance. The library is an order of magnitude smaller than conventional whole-genome gRNA libraries (40,000-180,000 gRNAs), which enables rigorous analyses with multiple replicates.

[0179] Base editing kinase catalytic function in cells: After these technical developments and optimizations, a guide library targeting 22 kinases for base editing was selected (Table A).

TABLE A
Base editing pilot experiment gRNA library details.

| | | # of | | | # of |
|---|---|---|---|---|---|
| | # of | splice | # of | | essential |
| | essential | site | catalytic | # | genes |
| Family | genes | guides | guides | total | observed* |
| Kinases | 22 | 66 | 244 | 310 | 10 (45%) |

[0180] This library was used to perform a pilot base editing experiment in T47D estrogen receptor positive (ER+) breast cancer cells to determine which enzymes when catalytically inhibited cause ER+ breast cancer cell lethality (i.e. catalytic function is essential) or increased growth (i.e. catalytic function is growth suppressive) (FIG. 4A). Essential guides showed a greater log fold change (LFC) compared to control guides (FIG. 4B).

[0181] The kinase family is shown in a separate panel for clarity (FIG. 5).

[0182] Focusing on kinases (FIG. 5), the data showed that ATM, PLK4, and CDK9 kinase catalytic inhibition leads to triple-negative breast cancer (TNBC) cell lethality. The ATM phenotype is particularly striking since ATM genetic catalytic inhibition causes embryonic lethality in vivo^{15,16}, even though it is not an essential gene as shown by KO in vitro and in vivo¹⁵⁻¹⁷ and is a tumor suppressor in many cancer types. Importantly, each kinase gene candidate is represented by guides targeting multiple distinct catalytic sites which, as discussed above, are predicted to similarly kill kinase activity, showing the robustness of the general approach to create kinase dead mutants.

[0183] To confirm base editing of the catalytic site, the top kinase hit gRNA, K_VAIK_PLK4_1 (a gRNA editing the VAIK catalytic lysine in PLK4) was focused on. T47D cells were edited and it was found that 16% of sequences were modified (FIG. 6A), the vast majority of which showed edits at the catalytic lysine (FIG. 6B). Virtually all edits were A>G confirming ABE specificity (FIG. 6C).

[0184] This overall conceptual framework may be expanded in two large scale directions: 1) investigating enzyme inhibition in additional normal cell lines and cancer cell lines reflecting a wide variety of tumor types and histologies, and 2) analyzing a large number of functional readouts and phenotypes, including cell viability, cell viability in the setting of chemotherapy and targeted therapy treatment, gene expression, and cell surface expression of immune checkpoint markers (e.g. PD-L1).

### Variations

[0185] Certain edits (but not all, for the chosen enzymes) can be made at similar sites using a cytosine base editor but the amino acid chemistry is not as rigorous to confirm enzyme dead activity, as the resulting edits may still bind ATP or engage in ATP transfer. Importantly, the gRNA sequences themselves would remain identical even if a cytosine base editor were deployed. Prime editing can directly mutate amino acids to any other amino acid (such as alanine which would be ideal) but prime editing techniques currently suffer from extremely low efficiencies (<10%) so could not be deployed to inhibit a large family of enzymes.

### Summary

[0186] There is no available base editing approach or published gRNAs to specifically inhibit enzyme activity. Some groups have used base editing to model oncogenic mutations or perform mutational scanning using tiling based approaches^{3-5,18}.

[0187] Using traditionally CRISPR-Cas9 approaches that create double stranded breaks, the Vakoc group (Vakoc Human Kinase Domain-Focused CRISPR Knockout Library, Addgene). Has developed a lentiviral CRISPR knockout library that contains gRNAs that tiles across only the kinase domain of protein kinases. Targeting the functional domain of proteins enhances the severity of the negative selection screen. This is not base editing-based, and the approach described herein is more precise as it specifically targets enzyme activity.

[0188] In this invention, a set of guide RNAs for precise, surgical inhibition of kinase enzymes, mimicking the effects of small-molecule active-site inhibitors is disclosed. It represents an impactful advance, challenging traditional dogma of conventional gene KO studies because it will directly implicate catalytic mechanisms in driving a phenotype. This work will also directly compare for the first time the functional effects of enzyme catalytic inhibition and KO, enabling rational kinase targeting by the drug type that maximizes cell lethality: a catalytic inhibitor versus a protein degrader. The technical innovation described herein will enable drug discovery in a drastically shorter timespan (years versus decades), which will translate into practical innovation. Moreover, as all enzyme classes contain conserved catalytic amino acids whose mutation kills enzyme activity, approach described herein is scalable to inhibit any enzyme class for cancer eradication.

[0189] Identifying new enzyme targets will commercially transform oncology and other diseases with potential pharma, biotech, and basic science users/customers through 1) immediate clinical testing of existing enzyme active-site inhibitors as monotherapy or combination; 2) long-term drug development investments to develop more selective enzyme active-site inhibitors, monoclonal antibodies, and allosteric inhibitors; 3) material use of the gRNA sequences as therapeutic leads themselves for base editing therapies for germline genetic diseases or cancers caused by activating enzyme mutations, in a “one size fits all” manner killing enzyme activity rather than correcting individual mutations one at a time.

### Example 1

### REFERENCES

[0190] 1. Komor, A. C., Kim, Y. B., Packer, M. S., Zuris, J. A. & Liu, D. R. Programmable editing of a target base in genomic DNA without double-stranded DNA cleavage. Nature 533, 420-424, doi:10.1038/nature17946 (2016).
[0191] 2. Gaudelli, N. M. et al. Programmable base editing of A*T to G*C in genomic DNA without DNA cleavage. Nature 551, 464-471, doi:10.1038/nature24644 (2017).
[0192] 3. Hanna, R. E. et al. Massively parallel assessment of human variants with base editor screens. Cell 184, 1064-1080 e1020, doi:10.1016/j.cell.2021.01.012 (2021).
[0193] 4. Cuella-Martin, R. et al. Functional interrogation of DNA damage response variants with base editing screens. Cell 184, 1081-1097 e1019, doi:10.1016/j.cell.2021.01.041 (2021).
[0194] 5. Sangree, A. K. et al. Benchmarking of SpCas9 variants enables deeper base editor screens of BRCA1 and BCL2. Nat Commun 13, 1318, doi:10.1038/s41467-022-28884-7 (2022).
[0195] 6. Richter, M. F. et al. Phage-assisted evolution of an adenine base editor with improved Cas domain compatibility and activity. Nat Biotechnol 38, 883-891, doi:10.1038/s41587-020-0453-z (2020).
[0196] 7. Walton, R. T., Christie, K. A., Whittaker, M. N. & Kleinstiver, B. P. Unconstrained genome targeting with near-PAMless engineered CRISPR-Cas9 variants. Science 368, 290-296, doi:10.1126/science.aba8853 (2020).
[0197] 8. Kluesner, M. G. et al. CRISPR-Cas9 cytidine and adenosine base editing of splice-sites mediates highly-efficient disruption of proteins in primary and immortalized cells. Nat Commun 12, 2437, doi:10.1038/s41467-021-22009-2 (2021).
[0198] 9. Huse, M. & Kuriyan, J. The conformational plasticity of protein kinases. Cell 109, 275-282, doi:10.1016/s0092-8674(02)00741-9 (2002).
[0199] 10. Iyer, G. H., Moore, M. J. & Taylor, S. S. Consequences of lysine 72 mutation on the phosphorylation and activation state of cAMP-dependent kinase. J Biol Chem 280, 8800-8807, doi:10.1074/jbc.M407586200 (2005).
[0200] 11. Gibbs, C. S. & Zoller, M. J. Rational scanning mutagenesis of a protein kinase identifies functional regions involved in catalysis and substrate interactions. J Biol Chem 266, 8923-8931 (1991).
[0201] 12. Varjosalo, M. et al. Application of active and kinase-deficient kinome collection for identification of kinases regulating hedgehog signaling. Cell 133, 537-548, doi:10.1016/j.cell.2008.02.047 (2008).
[0202] 13. Ahler, E. et al. A Combined Approach Reveals a Regulatory Mechanism Coupling Src's Kinase Activity, Localization, and Phosphotransferase-Independent Functions. Mol Cell 74, 393-408 e320, doi:10.1016/j.molcel.2019.02.003 (2019).
[0203] 14. Kung, J. E. & Jura, N. Structural Basis for the Non-catalytic Functions of Protein Kinases. Structure 24, 7-24, doi:10.1016/j.str.2015.10.020 (2016).
[0204] 15. Yamamoto, K. et al. Kinase-dead ATM protein causes genomic instability and early embryonic lethality in mice. J Cell Biol 198, 305-313, doi:10.1083/jcb.201204098 (2012).
[0205] 16. Daniel, J. A. et al. Loss of ATM kinase activity leads to embryonic lethality in mice. J Cell Biol 198, 295-304, doi:10.1083/jcb.201204035 (2012).
[0206] 17. Tsherniak, A. et al. Defining a Cancer Dependency Map. Cell 170, 564-576 e516, doi:10.1016/j.cell.2017.06.010 (2017).
[0207] 18. Sanchez-Rivera, F. J. et al. Base editing sensor libraries for high-throughput engineering and functional analysis of cancer-associated single nucleotide variants. Nat Biotechnol 40, 862-873, doi:10.1038/s41587-021-01172-3 (2022).

### Example 2—Base-Editing the Cancer Kinome to Enable Drug Discovery

### Description

[0208] The human genome contains 556 kinase genes, commonly called the kinome^{1,2}. Kinases are enzymes that regulate nearly all aspects of cell signaling. Notably, abnormal cell signaling arising from many events including kinase dysregulation leads to excess cell proliferation and is a hallmark of cancer³. Kinases are among the most important and popular targets in precision oncology due to the case in assaying their activities in cells and designing small-molecule inhibitors. Although 85% of the kinome is dysregulated in cancer and other diseases⁴, however, most kinases are untapped as therapeutic targets—at present approved inhibitors target only 10% of the kinome⁵. The ideal kinase targets or kinase drug combinations for most cancers have not been established⁶. Determining the cellular consequences of turning off kinase enzymes has immense potential to transform our understanding of kinases and kinase inhibitors.

[0209] Compositions and methods described herein include cutting-edge base-editing tools to precisely mutate amino acids necessary for enzyme catalysis in every kinase across the kinome, and their use in analyzing how kinase catalysis regulates cancer cell function and identifying novel therapeutic targets to enable drug discovery (FIG. 7). Just as an engine is essential to keep a car running, enzyme catalysis is critical for kinase function. If the engine is broken, the car is dead and will not run. Studying how a car performs in a complex system is best accomplished not by removing the entire car, but rather by altering specific parts, some of which are necessary for function (engine, tires) and others which are dispensable (color of the car). Equally, for kinases, knock-out and knock-down are crude tools that remove the entire gene, yielding insufficiently detailed or difficult to interpret information about kinase cellular functions. Moreover, neither knock-out nor knock-down approaches necessarily translate to the effects of a small molecule inhibitor, and unsurprisingly have yielded few standard anticancer therapies. Therefore, studying how a kinase functions in cells to enable drug discovery is best accomplished by altering its specific amino acids necessary for catalytic function, which will act as a surrogate for small-molecule inhibition.

[0210] The base-editing approach to inactivate kinase catalysis as described herein solves two major issues that prevent existing mutagenesis methods from scaling across the kinome and performing mutations at physiologic levels. Classical site-directed mutagenesis can turn off kinase catalysis by overexpressing mutant kinase genes. This is scalable across the kinome but is non-physiologic as it artificially increases protein levels in cells⁷. Alternatively, gene knock-in can introduce point mutations at endogenous genomic loci to turn off catalysis kinase-by-kinase. However, knock-in is extremely inefficient, requiring single cell isolation to ensure mutation⁸, and so would take decades to scale across the kinome. In contrast, base editing can efficiently mutate hundreds of genes at physiologic levels in cells in a single pooled experiment⁹⁻¹³. Base-editing human kinases results in accelerated kinase target validation and drug discovery but requires a systematic high-throughput approach to edit catalytic activities endogenously and scale across the entire kinome.

[0211] Disclosed herein is a base editing platform to selectively mutate individual catalytic amino acids in 556 kinases at physiologic levels in cancer cells for pooled functional studies. A breast cancer model is used as a case study because multiple kinase inhibitors are standard therapies for breast cancer but combinatorial treatments are urgently needed. The base editing platform is used to interrogate how kinase activity regulates 1) cancer cell growth, 2) sensitivity to existing targeted therapies, and 3) druggable gene expression. Notably, this platform compresses the interval between kinome hit and lead discovery from decades to years by identifying the optimal mechanisms to inhibit kinases, transforming kinase drug developments and design of combination therapies.

### Background and Significance

[0212] Kinases in Normal and Cancer Cells: Kinases transfer phosphate from ATP to proteins, lipids, and other substrates¹⁴. Protein phosphorylation alters protein activity, stability, localization, and interactions, and lipid phosphorylation activates signaling and specifies membrane identity. Kinases function as molecular switches in virtually all cellular processes including cell growth, therapeutic responses, and gene expression. Despite its importance in biology, one third of the kinome has unknown function in cells¹⁵.

[0213] Kinase genes are frequently altered in cancer, where they play causal roles as oncogenes and tumor suppressors⁵. Advances in tumor genome sequencing have largely identified the kinase drivers of cancer. Kinase inhibitors including active-site inhibitors that mimic ATP binding are some of the most effective therapies in oncology⁵. Kinases also have noncatalytic functions that can be targeted by allosteric inhibitors or small-molecule protein degraders. Despite critical gains in targeting kinases in cancer, there have also been notable failures and challenges. Many cancers rewire cell signaling in specific contexts that vary by tissue type, genetic background, and drug treatment, resulting in alternative kinase dependencies⁵. For example, estrogen receptor-positive breast cancer is dependent on CDK4/6, PI3K, and mTOR kinases for cell growth. Combining inhibitors to any of these kinases with antiestrogen therapies improves patient survival versus antiestrogen therapy alone 16. Understanding kinase dependencies in cancer is critical for elucidating signaling pathways and discovering new kinases for therapeutic targeting; however, the functional diversity of kinases across the kinome complicates this effort. New approaches are needed that can handle this complexity at scale.

[0214] Models of Kinase Loss of Function and their Inadequacies for Target Validation: Unbiased whole-genome and kinome loss-of-function approaches such as RNA interference or clustered regularly interspaced short palindromic repeats (CRISPR)-Cas9 knock-out screens have established critical roles for kinases in cell growth, therapy response, and gene expression¹⁷⁻²³. Pharmacologic screens using small molecules are frequently used to inhibit kinase activity for drug discovery or repurposing²⁴. However, genetic and pharmacologic screens have resulted in few approved kinase inhibitors, and new unbiased tools are needed to understand kinase function.

[0215] Genetic knock-out screens are imperfect tools because absence of a protein rarely mimics inhibition of an intact protein²⁵⁻²⁷. For example, for some kinases, knock-out mutants are not lethal but catalytic inactivating mutants cause cell lethality, and vice versa^{27,28}, due to competing functions of domains outside the kinase domain²⁹ and upregulation of genes that compensate for kinase loss^{30,31}. Knock-outs simulate the effects of protein degrader molecules rather than catalytic inhibitors. Pharmacologic screens are imperfect tools: many kinases lack potent drug inhibitors, and existing kinase inhibitors can be promiscuous where off-target effects may drive a phenotype³². These issues compromise the utility of drug screens to discover new kinase targets. Nominating a kinase target and then proving that kinase catalytic inhibition causes cancer cell lethality can take years and significant resources. A high-throughput method to identify all kinases whose inhibition of catalytic activity causes cancer cell lethality overcomes this bottleneck.

[0216] Turning off Kinome Catalysis at Physiologic Levels: A genetic tool to selectively disable enzyme catalysis while retaining physiological protein levels accelerates our understanding of enzyme function in cells by mimicking the effects of enzyme inhibitors. Kinase activity is dependent on amino acids both in and distant from the active site. Certain amino acids in the kinase active site are conserved and shown to be necessary for catalysis in protein, cell, and mouse models consistently across the kinome. Site-directed mutagenesis of conserved active-site amino acids to create “kinase-dead” mutants is useful to test necessity of catalytic function^{7,33,34}. In contrast, amino acids distant from the active site are not conserved across the kinome and mutating them can have inconsistent effects on kinase activity, including inactivation, neutral effects, or activation. Mutating catalytic amino acids is superior to mutating distant amino acids to model loss of kinase catalysis at scale.

[0217] Existing methods to turn off kinase catalysis suffer from lack of both scalability and endogenous perturbation. Overexpressing mutated kinase genes can model kinome inhibition, but data interpretation is confounded by non-physiologic levels of mutant kinase protein expression⁷. CRISPR knock-in mutagenesis at endogenous genomic loci is extremely inefficient, requiring isolation of single cells. Using knock-in to inhibit all kinases in the kinome is unfeasible, as it would require thousands of arrayed experiments which would take decades for a single lab to complete. In contrast, techniques such as the base editing platform described herein can efficiently install point mutations in genes at physiologic levels^{9,10}. Other groups have proven the feasibility of base editing to scan and mutate throughout a gene's primary sequence using tiling approaches¹¹⁻¹³ but no one has ever deployed base editing for precise surgical inhibition of a large and diverse family of enzymes in a comprehensive manner.

[0218] Unlocking the Potential of the Kinome for Cancer Drug Targets: Modeling the catalytically dead kinome enables the systematic analysis of how kinases regulate cancer cell growth, response to targeted therapies, and druggable gene expression. Such an approach can be utilized to serve as a discovery platform for detailed mechanistic inquiry into the downstream signal transduction molecules and pathways that mediate these phenotypes. It also accelerates the nomination of kinase targets for pharmacologic inhibition in cancer, either as monotherapy or in combination with approved therapies, compressing a timeline of decades into a few years.

### Technology Development to Overcome Previous Limitations

[0219] Available genetic tools cannot selectively turn off endogenous kinase catalytic activity in cells at scale. Described herein is a base editing approach to selectively mutate amino acids necessary for kinome catalysis. To engineer such a approach, a suite of new tools was developed, including: 1) an adenine base editor that can bind to any genomic sequence to enable site-specific editing; 2) identification of catalytically necessary amino acids for every human kinase; 3) a guide RNA (gRNA) library to edit catalytic amino acids and splice sites resulting in catalytic loss and whole kinase gene loss, respectively; and 4) sophisticated proteomic strategies to prove on-target loss of kinase catalysis in cells.

[0220] Adenine base editor: Base editing generates precise point mutations from C→T or A→G in genomic DNA. Base editors are comprised of fusions between a Cas9 nickase and a cytosine or adenine deaminase^{9,10}. Upon binding to the target locus, base pairing between the gRNA molecule and target DNA strand displaces a small segment of DNA, forming an editing window that can be modified by the deaminase (FIG. 8A). Compared with CRISPR knock-in, base editing is much more efficient; creates nearly 100% homozygous mutations in cells that undergo editing^{9,10}; does not require single-cell isolation, which can introduce artifacts; and is well suited to functionally assess thousands of gene variants in a single experiment¹¹⁻¹³. Adenine base editing is preferred for this purpose because it allows for mutation of all possible codons of the amino acids responsible for kinase catalysis (FIGS. 9A-9C), unlike cytosine base editing, which can mutate only a subset.

[0221] Base editors require a protospacer adjacent motif (PAM) site (usually NGG) at 13-19 base pairs downstream of the targeted base for DNA binding. This critical limitation often prevents base editors from introducing a desired point mutation. Therefore, a base editor containing 1) ABE8e, an adenine deaminase associated with one of the highest editing efficiencies (˜40-80% for most of the sites tested)³⁸; 2) SpRY-Cas9, a Cas9 ortholog with greater target site flexibility (NGN, NAN, and, to a lesser extent, NCN and NTN PAMs) that can bind to any sequence for site-specific editing³⁹; and 3) a GFP marker and blasticidin resistance cassette for flow cytometry and antibiotic selection was generated (FIG. 8B). A plasmid encoding the engineered base editor was transduced to create a variety of stable cell lines with high levels of base editor expression.

[0222] Kinase protein engineering: The protein kinase structural fold is well conserved throughout evolution, and almost every kinase contains three invariant amino acids located in canonical sequence motifs: 1) VAIK, whose lysine (K) coordinates the phosphates in ATP; 2) HRD, whose aspartate (D) is the catalytic base for the kinase reaction; and 3) DFG, whose aspartate (D) binds to magnesium ions necessary for ATP coordination³³ (FIG. 9A).

[0223] Mutations at any of these sites abrogate kinase activity^{7,25,33,34,40,41} and are frequently used to model catalytically dead kinases in protein, cell, and mouse models. Specifically, adenine base editing would result in amino acid mutations of K→(E/R/G) and D→G, which invert charge (K→E), eliminate charge (K→G, D→G), or increase size (K→R) (FIG. 9B). These mutations kill kinase activity because amino acids with charge inversion or elimination cannot perform ATP transfer chemistry, and amino acids with increased size (even with identical charge as with K→R) cannot be sterically accommodated in the active site to coordinate ATP^{25,33,34,40}. To generate the base editing platform, each of these motifs in every kinase in the human kinome were identified using bioinformatic analysis of sequence alignments, and their amino acid and genomic coordinates were located for base editing (FIG. 9C). The only kinases without these sites were known pseudokinases, genes with sequences similar to kinases but which lack kinase activity.

[0224] Kinome gRNA library design: gRNAs molecules were then designed to edit catalytic residues, targeting at least one site in ˜97% of kinases and two or three sites in ˜91% of kinases. Some sites are lost through either intrinsic lack of catalytic residues (pseudokinases¹) or the presence of termination sequences⁴². Adenine base editing cannot create stop codons¹⁰, necessitating an alternative approach to model gene loss, so splice donor sites editing, which leads to effective knock-out⁴³, is used for that purpose. The pooled design of the assay enables direct comparison between kinase-dead and knock-out conditions—and does so at the scale of the entire human kinome. For positive controls, splice sites in known essential genes are edited, as well as genes encoding cell-surface proteins to confirm editing by flow cytometry. For negative controls, nontargeting guides, empty-window guides targeting essential loci without adenines in the editing window¹², and guides targeting safe harbor gene loci that do not affect the cell⁴⁴ are used.

[0225] The entire library contains ˜6,000 gRNAs (FIG. 10), with 5 kinase-dead and 5 kinase knock-out gRNAs on average for each kinase. The library was cloned into a lentiviral vector with puromycin resistance. Notably, the library is an order of magnitude smaller than conventional whole-genome gRNA libraries (40,000-180,000 gRNAs), which enables rigorous analyses with multiple replicates.

### Experimental Strategy

[0226] Kinase Function in Cells: The base-editing platform may be utilized to answer three unsolved questions in how kinases control cancer cells: 1) which kinase activities are essential for cancer cell growth; 2) how kinase catalytic inhibition increases sensitivity to targeted therapies in breast cancer; and 3) how kinase catalytic inhibition alters druggable gene expression in breast cancer. Answering these questions determines the precise effects of inhibiting all human kinases on cancer phenotypes, at unprecedented scale and selectivity.

[0227] Which kinase activities are essential for cell growth? Gene knock-down/knock-out studies have determined the repertoire of kinases essential for cell growth, but provide little insight across the kinome into which parts of kinases, catalytic or noncatalytic, affect cell growth. Using the compositions and methods described herein, parallel mutagenesis of all kinases in the kinome in pooled cellular assays can be performed to identify those whose catalytic inhibition results in increased lethality. Splice site “knock-out guides” targeting all 556 kinases in the same library may also be included (B.3.c. gRNA library design). These “knock-out guides” serve for two important purposes: 1) to knock out essential kinases which will cause cell lethality, to use as positive controls for base editing; and 2) to directly compare the cellular consequences of kinase-dead and knock-out conditions at the scale of the entire human kinome. Various cell lines may be used, including HAP1 leukemia cells, which are commonly used for gene editing because they are haploid, removing any possibility of confounding heterozygous mutations. Other diverse cancer cell lines that are standard models in gene editing and express the adenine base editor described herein, including MDA-MB-231 (breast), A375 (skin), HT29 (colon), and A549 (lung), may also be used.

[0228] Stable cell lines bearing the adenine base editor are lentivirally transduced with the gRNA library and selected with puromycin for two (2) days. A sample is collected (T₀ “unselected”), cells are cultured for two (2) weeks for growth selection, and then another sample is collected (T_{end} “selected”) (FIG. 12). For both timepoints, genomic DNA is isolated and the integrated lentiviral cassette containing the gRNA is amplified and sequenced using next generation sequencing (NGS). Each screen is performed in at least three replicates to accurately measure enrichment/depletion of each gRNA.

[0229] For computational analysis, guide depletion (essential kinases) or enrichment (growth-suppressive kinases) for each kinase is ranked compared to unselected sample for each cell line using Robust Rank Aggregation⁴⁷. Guides targeting catalytic residues are grouped separately from guides targeting splice sites for each kinase to compare the growth effects of loss of catalytic activity with those of loss of the whole kinase. Of particular interest are 1) kinases causing discordant cell-growth phenotypes as kinase-dead mutants versus kinase knock-out mutants and 2) kinases causing differing phenotypes in different cell types. For validation, the top 5 kinases with the greatest positive and negative log fold changes in cell growth as kinase-dead versus kinase knock-out mutants are prioritized. To determine the mechanisms underlying the effects of kinase catalytic inhibition versus kinase loss on cell growth, isogenic kinase-dead and kinase knock-out stable cell lines are generated with the guides described herein. Adenine base editing and catalytic amino acid mutation is confirmed using NGS.

[0230] Additionally, 1) phosphorylation of known kinase substrates using Western blotting and 2) unbiased cellular phosphorylation changes using phosphoproteomics are measured (B.3.d. Phosphoproteomic motif validation). Accordingly, the base editing platform described herein may be used to analyze gene essentiality in cancer cells by precisely defining which kinases and which of their catalytic and noncatalytic functions affect cell growth.

[0231] How does kinase inhibition improve response to targeted therapies? Breast cancer is the most common cancer in women worldwide⁴⁸. The most common subtype of breast cancer is estrogen receptor-positive breast cancer (ER+ BC), which overexpresses the transcription factor ER and is dependent on estrogen. Anti-estrogen therapies such as the ER degrader fulvestrant are standard therapies that improve overall survival in patients with ER+ BC. Kinase dysregulation is a common feature of ER+ BC, and inhibitors of the kinases CDK4/6, mTOR, and PI3K increase the efficacy of fulvestrant and are approved therapies in ER+ BC¹⁶. Invariably, patients with metastatic ER+ BC will fail to respond or develop drug resistance, necessitating new tools for kinase target discovery. Knock-out screens have been performed in ER+ BC⁴⁹ but have largely not resulted in development of new drugs.

[0232] Editing the kinome to identify new targets whose catalytic inhibition increases breast cancer lethality is transformative for oncology because it enables 1) immediate clinical testing of existing kinase active-site inhibitors and 2) long-term investments to develop more selective kinase active-site inhibitors, monoclonal antibodies, and allosteric inhibitors. Kinase knock-out mimics the effects of a protein degrader rather than an active-site inhibitor (FIG. 13). Moreover, identifying kinases whose catalytic inhibition has no effect but whose knock-out increases cell lethality (borrowing the car analogy: turning off the engine is not enough; the car must be destroyed) will provide a rationale to test and develop targeted protein degraders for new target kinases (FIG. 13). Additionally, inhibition of many kinases alone without inhibiting ER is clinically ineffective in ER+ BC, pointing to the necessity of scalable tools to determine new combination therapies targeting kinases and ER.

[0233] Accordingly, the base-editing platform may be used to identify new kinase therapeutic vulnerabilities in ER+ BC in combination with fulvestrant. Stable MCF7 and T47D ER+ BC cell lines expressing the adenine base editor described herein were generated. These cells are standard models for ER+ BC and are sensitive to fulvestrant, as are patients. Using these cells, a negative selection with fulvestrant concentrations that kill 20% of cells is applied (FIG. 12). The following results are prioritized: 1) kinases that increase fulvestrant lethality when kinase-dead but not on knock-out as new targets for active-site kinase inhibitors (FIG. 13, upper right corner) and 2) kinases that increase fulvestrant lethality on knock-out but not when kinase-dead as new targets for kinase degraders⁵⁰ (FIG. 13, lower left corner). For top hits, isogenic kinase-dead and kinase knock-out cancer cell lines are created. Changes in cell proliferation and tumor formation (e.g., by injecting these cells into mice to create xenografts) on exposure to fulvestrant combined with kinase active-site inhibitors and kinase degraders⁵¹ are measured. Also, effects on ER-dependent transcription are measured using quantitative reverse transcription PCR. In parallel, positive selection experiments are performed to identify the kinases whose catalytic inhibition and knock-out cause fulvestrant resistance. This approach may be expanded to test other ER+ BC-targeted therapies including CDK4/6 and PI3K inhibitors. Together, these approaches will multiply the number of new kinase targets for combination therapies with kinase inhibitors and fulvestrant in ER+ BC.

[0234] How does kinase inhibition regulate druggable gene expression? The first two questions focus on cancer cell growth, but kinase inhibition can lead to diverse genetic changes that do not affect cell growth but might nonetheless be targeted with combination therapies. For example, PI3K inhibition in ER+ BC leads to increased ER-dependent transcription and combining PI3K and ER inhibitors is more effective than single therapies in breast cancer patients⁵²⁻⁵⁴. Recent advances in molecular phenotyping allow for single cell readouts of transcription that, when coupled with CRISPR genome editing, can refine our understanding of how genetic perturbations affect gene expression and cell state^{55,56}. Thus far, these large-scale approaches have used single-cell readouts for gene knock-out and transcriptional regulations only. Growth factors can induce a diverse range of gene expression by activating receptor kinases that turn on and off a multitude of downstream kinases and signaling pathways. Given this complexity, the significance of kinase catalysis across multiple signaling pathways on gene expression is poorly understood⁵⁷.

[0235] Accordingly, the compositions and methods described herein may be used to determine how kinase catalytic inhibition alters druggable gene expression by performing single-cell RNA sequencing on base-edited cells to nominate new kinase-kinase and kinase-phosphatase pairs for combination inhibition.=ER+ BC, which is a transcriptionally driven cancer and is primarily treated using combination therapies instead of single drugs, is a case example used to analyze kinase-druggable gene crosstalk mechanisms.

[0236] Single-cell RNA sequencing on kinase base-edited MCF7 cells using Expanded CRISPR-compatible CITE-seq (ECCITE-seq)⁵⁸ is performed. ECCITE-seq directly captures gRNA sequences using a custom reverse transcriptase primer for single-cell sequencing. Barcoded gel beads and reverse transcription reagents are combined with single-cell suspensions using microfluidics and partitioned into droplet emulsions. Cells are lysed, and mRNA transcripts are captured, reverse-transcribed, barcoded, and amplified into NGS libraries on a 10× Genomics instrument. 300,000 cells (3,000 gRNAs in the kinase-dead sublibrary at 100 cells per guide) are sequenced. To decrease the per-cell cost, ECCITE-seq's capabilities for cell overloading, sample multiplexing, and doublet cell detection (“Cell Hashing”) and deconvolution during sample preparation and data analysis⁵⁸ may be utilized.

[0237] Data is visualized using single-cell dimensionality reduction (e.g., UMAP, t-SNE) to cluster transcriptionally similar cells and focus the analysis on subpopulations that are phenotypically distinct from wildtype. Transcriptional phenotypes are analyzed to interrogate how kinases catalytically regulate gene expression of kinases themselves and of phosphatases, a family of 198 druggable enzymes that remove phosphates from substrates^{60,61} and oppose the effects of kinases (FIG. 14).

[0238] This analysis delineates a kinase-druggable gene interdependency network and raise numerous hypotheses for kinase cross-talk mechanisms and new combination therapies. These hypotheses are validated using quantitative PCR and RNA sequencing of individual kinase base-edited cell lines. Combination drugging strategies targeting interdependent kinase-kinase and kinase-phosphatase pairs may be tested and cell lethalities may be compared by single-gene versus double-gene inhibition. Target gene expression in kinase-dead cells and in cells treated with small-molecule kinase inhibitors may be compared to determine on-and off-target changes. This approach is scalable to investigate the effects of kinase inhibition on the expression of other druggable genes (e.g., nuclear hormone receptors, immune checkpoints).

### Potential Alternative Approaches

[0239] Although base editing is less efficient than CRISPR-Cas9 nuclease editing (40-80% versus >90%), base-editing screens have nonetheless yielded many biologically and therapeutically important findings¹¹⁻¹³. To maximize sensitivity (i.e., increase true positives and decrease false negatives), each kinase-dead guide for a particular kinase for analysis may be binned together, and any kinase with at least one scoring guide (e.g., call as a positive hit a kinase where HRD guide scores but VAIK and DFG guides do not) may be set as a true positive threshold. If there are too few hits due to low base-editing efficiencies, it is possible to 1) increase the number of kinase-dead guides, targeting other conserved catalytic amino acids including the asparagine +5 after HRD⁶² and the glutamate +7 after VAIK62 (˜10 total guides per kinase), and 2) increase the number of cells in all pooled experiments by 5-fold to ensure a sufficient absolute number of base-edited cells for analysis.

### Innovation

[0240] Conceptual Innovation: A Genetic Approach to Enzyme Inhibition: A novel base editing platform for precise, surgical inhibition of a large, diverse family of enzymes in a comprehensive fashion. This platform will inhibit every kinase in the human genome, mimicking the effects of small-molecule active-site inhibitors. It represents an impactful advance from gene knock-out studies, which form the backbone of most knowledge of human kinase function, because it directly implicates catalytic mechanisms in driving a phenotype. This platform also allows for the direct comparison of the functional effects of kinase catalytic inhibition and knock-out for the first time, enabling rational kinase targeting by the drug type that maximizes cancer cell lethality: a catalytic inhibitor versus a protein degrader.

[0241] Technical Innovation: A Base-Editing Platform to Rapidly Disable Kinase Activity at Scale in Cells: The methods and compositions described herein leverage base editing to perform site-directed mutagenesis at scale to kill kinase activity, which contrasts with other uses of base editing to model oncogenic mutations or perform mutational scanning^{11-13,63}. This is the first single-cell readout of a high-throughput base-editor screening approach, enabling new kinase-druggable enzyme combination therapies.

[0242] Material Innovation: A gRNA library targeting 556 kinases at catalytic residues and a novel base editor with high editing efficiency and a liberalized PAM requirement. Moreover, as base editing is being investigated in vivo as a disease treatment⁶⁴, these gRNA sequences may be therapeutic utilized themselves for germline genetic diseases or cancers caused by activating kinase mutations.

### Example 2

### REFERENCES

[0243] 1. Manning, G et al. Science 298, 1912 (2002).
[0244] 2. Moret, N et al. bioRxiv, 2020.04.02.022277 (2021).
[0245] 3. Hanahan, D et al. Cell 100, 57 (2000).
[0246] 4. Wilson, LJ et al. Cancer Res 78, 15 (2018).
[0247] 5. Ferguson, FM et al. Nat Rev Drug Discov 17, 353 (2018).
[0248] 6. Essegian, D et al. Cell Rep Med 1, 100128 (2020).
[0249] 7. Varjosalo, M et al. Cell 133, 537 (2008).
[0250] 8. Ran, FA et al. Nat Protoc 8, 2281 (2013).
[0251] 9. Komor, AC et al. Nature 533, 420 (2016).
[0252] 10. Gaudelli, NM et al. Nature 551, 464 (2017).
[0253] 11. Hanna, RE et al. Cell 184, 1064 (2021).
[0254] 12. Cuella-Martin, R et al. Cell 184, 1081 (2021).
[0255] 13. Sangree, AK et al. Nat Commun 13, 1318 (2022).
[0256] 14. Hunter, T. Cell 100, 113 (2000).
[0257] 15. Finan, C et al. Sci Transl Med 9 (2017).
[0258] 16. Burstein, HJ. N Engl J Med 383, 2557 (2020).
[0259] 17. Grueneberg, DA et al. PNAS 105, 16472 (2008).
[0260] 18. Baldwin, A et al. PNAS 105, 16478 (2008).
[0261] 19. Bommi-Reddy, A et al. PNAS 105, 16484 (2008).
[0262] 20. Grueneberg, DA et al. PNAS 105, 16490 (2008).
[0263] 21. Baldwin, A et al. PNAS 107, 12463 (2010).
[0264] 22. Tsherniak, A et al. Cell 170, 564 (2017).
[0265] 23. Behan, FM et al. Nature 568, 511 (2019).
[0266] 24. Letai, A et al. Cancer Cell 40, 26 (2022).
[0267] 25. Kung, JE et al. Structure 24, 7 (2016).
[0268] 26. Knight, ZA et al. Cell 128, 425 (2007).
[0269] 27. Weiss, WA et al. Nat Chem Biol 3, 739 (2007).
[0270] 28. Newton, K. Trends Cell Biol 25, 347 (2015).
[0271] 29. Mace, PD et al. J Biol Chem 296, 100705 (2021).
[0272] 30. El-Brolosy, MA et al. Nature 568, 193 (2019).
[0273] 31. El-Brolosy, MA et al. PLoS Genet 13, e1006780 (2017).
[0274] 32. Knight, ZA et al. Nat Rev Cancer 10, 130 (2010).
[0275] 33. Huse, M et al. Cell 109, 275 (2002).
[0276] 34. Gibbs, CS et al. J Biol Chem 266, 8923 (1991).
[0277] 35. Bailey, MH et al. Cell 173, 371 (2018).
[0278] 36. Vasan, N et al. Science 366, 714 (2019).
[0279] 37. Vasan, N et al. Nat Rev Clin Oncol 19, 471 (2022).
[0280] 38. Richter, MF et al. Nat Biotechnol 38, 883 (2020).
[0281] 39. Walton, RT et al. Science 368, 290 (2020).
[0282] 40. Iyer, GH et al. J Biol Chem 280, 8800 (2005).
[0283] 41. Ahler, E et al. Mol Cell 74, 393 (2019).
[0284] 42. Gao, Z et al. Mol Ther Nucleic Acids 10, 36 (2018).
[0285] 43. Kluesner, MG et al. Nat Commun 12, 2437 (2021).
[0286] 44. Sadelain, M et al. Nat Rev Cancer 12, 51 (2011).
[0287] 45. Needham, EJ et al. Sci Signal 12 (2019).
[0288] 46. Johnson, JL et al. bioRxiv, 2022.05.22.492882 (2022).
[0289] 47. Li, W et al. Genome Biol 15, 554 (2014).
[0290] 48. Waks, AG et al. JAMA 321, 288 (2019).
[0291] 49. Xiao, T et al. PNAS 115, 7869 (2018).
[0292] 50. Bekes, M et al. Nat Rev Drug Discov 21, 181 (2022).
[0293] 51. Donovan, KA et al. Cell 183, 1714 (2020).
[0294] 52. Bosch, A et al. Sci Transl Med 7, 283ra51 (2015).
[0295] 53. Toska, E et al. Science 355, 1324 (2017).
[0296] 54. Andre, F et al. N Engl J Med 380, 1929 (2019).
[0297] 55. Camp, JG et al. Science 365, 1401 (2019).
[0298] 56. Stuart, T et al. Nat Rev Genet 20, 257 (2019).
[0299] 57. Hill, CS et al. Sci STKE 1999, PE1 (1999).
[0300] 58. Mimitou, EP et al. Nat Methods 16, 409 (2019).
[0301] 59. Replogle, JM et al. Cell (2022).
[0302] 60. Chen, MJ et al. Sci Signal 10 (2017).
[0303] 61. Oprea, TI et al. Nat Rev Drug Discov 17, 317 (2018).
[0304] 62. Kanev, GK et al. Trends Pharmacol Sci 40, 818 (2019).
[0305] 63. Sanchez-Rivera, FJ et al. Nat Biotechnol 40, 862 (2022).
[0306] 64. Newby, GA et al. Mol Ther 29, 3107 (2021).
[0307] 65. Vasan, N et al. PNAS 107, 14176 (2010).
[0308] 66. Vasan, N et al. Oncologist 19, 453 (2014).

### Example 3—Base-Editing Kinase Screen

[0309] Results from a base editing kinase screen are shown in FIGS. 15-19. The top 50 sites decreasing the growth of T47D cells from MAGeCK RRA analysis are listed below.

TABLE B
Top 50 sites decreasing the growth of T47D cells.

| | | neg. | neg. p. | neg. | neg. |
|---|---|---|---|---|---|
| id | num | score | value | fdr | rank |
| RIPK2_VAIK | 18 | 8.2863E−08 | 1.9225E−06 | 0.00165 | 1 |
| RYK_DFG | 15 | 1.178E−07 | 5.7676E−06 | 0.00297 | 2 |
| MAP3K9_HRDplus5 | 18 | 1.4108E−07 | 1.9225E−06 | 0.00165 | 3 |
| MAP2K2_VAIK | 18 | 1.753E−07 | 1.9225E−06 | 0.00165 | 4 |
| Ctrl_ESS_PHB2 | 30 | 4.9189E−07 | 5.7676E−06 | 0.00297 | 5 |
| PIK3C3_HRD | 15 | 1.4304E−06 | 0.000017303 | 0.006365 | 6 |
| KSR1_splice | 30 | 2.5588E−06 | 0.000017303 | 0.006365 | 7 |
| ADCK1_VAIK | 18 | 3.0681E−06 | 0.000040373 | 0.011386 | 8 |
| ERN1_VAIK | 18 | 3.4636E−06 | 0.000044218 | 0.011386 | 9 |
| PRKDC_VAIK | 18 | 3.8268E−06 | 0.000044218 | 0.011386 | 10 |
| ITPKC_HRD | 18 | 7.4574E−06 | 0.000078823 | 0.016914 | 11 |
| CDK16_VAIK | 18 | 7.4773E−06 | 0.000078823 | 0.016914 | 12 |
| Ctrl_NONESS_BPIFB3 | 30 | 7.8169E−06 | 0.00011727 | 0.02157 | 13 |
| MAP3K7_HRD | 15 | 8.2868E−06 | 0.000094204 | 0.01866 | 14 |
| PRAG1_VAIK | 21 | 0.00001513 | 0.00022494 | 0.034071 | 15 |
| CDK5_HRD | 12 | 0.000016782 | 0.00015572 | 0.026733 | 16 |
| OBSCN_KD2_VAIK | 18 | 0.000022712 | 0.00026339 | 0.037679 | 17 |
| SPEG_splice | 30 | 0.000023881 | 0.00034029 | 0.043366 | 18 |
| BUB1B_HRD | 15 | 0.00002453 | 0.00022494 | 0.034071 | 19 |
| ACVRL1_splice | 30 | 0.000026413 | 0.00035951 | 0.043366 | 20 |
| TRIB3_splice | 30 | 0.000031996 | 0.00041334 | 0.043366 | 21 |
| RPS6KL1_VAIK | 18 | 0.000032379 | 0.0003672 | 0.043366 | 22 |
| Ctrl_ESS_PSMB4 | 30 | 0.000032551 | 0.00042103 | 0.043366 | 23 |
| TESK1_VAIK | 18 | 0.000036408 | 0.00039027 | 0.043366 | 24 |
| TRIB1_VAIK | 18 | 0.000037642 | 0.00040181 | 0.043366 | 25 |
| Ctrl_ESS_PUF60 | 30 | 0.000039149 | 0.00050178 | 0.049695 | 26 |
| Ctrl_NONESS_CASP2 | 30 | 0.00004605 | 0.0005979 | 0.054986 | 27 |
| BRSK1_HRD | 15 | 0.000047005 | 0.00052869 | 0.050422 | 28 |
| DCLK1_HRDplus5 | 18 | 0.000056836 | 0.00063251 | 0.056163 | 29 |
| TRIB3_VAIK | 18 | 0.000058317 | 0.00065558 | 0.056271 | 30 |
| MAPK15_HRDplus5 | 18 | 0.000061806 | 0.00069019 | 0.05733 | 31 |
| CDK9_HRD | 15 | 0.000073662 | 0.00075171 | 0.058956 | 32 |
| AATK_HRD | 15 | 0.00008491 | 0.00087859 | 0.064639 | 33 |
| RPS6KA5_KD2_HRD | 12 | 0.000085066 | 0.00075555 | 0.058956 | 34 |
| EIF2AK3_VAIK | 18 | 0.000088364 | 0.0009478 | 0.066765 | 35 |
| PRKCB_splice | 24 | 0.000093357 | 0.001067 | 0.072303 | 36 |
| MAP2K3_HRD | 15 | 0.000098741 | 0.00095934 | 0.066765 | 37 |
| PRKCH_VAIK | 18 | 0.00010627 | 0.0011131 | 0.073496 | 38 |
| MAPK14_VAIK | 18 | 0.00011857 | 0.00124 | 0.07788 | 39 |
| PIM3_splice | 30 | 0.00012562 | 0.001563 | 0.083849 | 40 |
| ADCK5_DFG | 15 | 0.00012669 | 0.00124 | 0.07788 | 41 |
| ALPK2_HRD | 15 | 0.00012938 | 0.0012746 | 0.078147 | 42 |
| TAOK2_HRD | 15 | 0.00013572 | 0.0013323 | 0.079784 | 43 |
| Ctrl_ESS_ATP6V0C | 18 | 0.00014074 | 0.001463 | 0.082759 | 44 |
| MAP3K3_HRD | 15 | 0.00014466 | 0.0014323 | 0.082759 | 45 |
| AXL_DFG | 15 | 0.00014855 | 0.0014784 | 0.082759 | 46 |
| WEE1_DFG | 15 | 0.0001547 | 0.0015246 | 0.083526 | 47 |
| Ctrl_NONESS_PRSS54 | 27 | 0.0001586 | 0.0018975 | 0.095807 | 48 |
| Ctrl_ESS_RPL4 | 30 | 0.00016228 | 0.0019937 | 0.098724 | 49 |
| MAP2K1_HRD | 15 | 0.00016703 | 0.0016591 | 0.087189 | 50 |

| | neg. | neg. | pos. | pos. p. | pos. |
|---|---|---|---|---|---|
| id | goodsgrna | lfc | score | value | fdr |
| RIPK2_VAIK | 17 | −1.0661 | 0.996 | 0.998 | 0.999998 |
| RYK_DFG | 13 | −1.2509 | 0.96225 | 0.98593 | 0.999998 |
| MAP3K9_HRDplus5 | 17 | −0.98684 | 0.99982 | 0.99984 | 0.999998 |
| MAP2K2_VAIK | 17 | −0.94366 | 0.92174 | 0.98052 | 0.999998 |
| Ctrl_ESS_PHB2 | 18 | −0.51128 | 0.46555 | 0.82597 | 0.999998 |
| PIK3C3_HRD | 12 | −1.1199 | 0.99962 | 0.99965 | 0.999998 |
| KSR1_splice | 20 | −1.035 | 0.34674 | 0.73382 | 0.999998 |
| ADCK1_VAIK | 13 | −1.0004 | 0.21357 | 0.52821 | 0.999998 |
| ERN1_VAIK | 15 | −0.91263 | 0.99976 | 0.99978 | 0.999998 |
| PRKDC_VAIK | 11 | −0.84195 | 0.79135 | 0.9432 | 0.999998 |
| ITPKC_HRD | 14 | −0.96916 | 0.99999 | 0.99998 | 0.999998 |
| CDK16_VAIK | 15 | −1.0981 | 0.8767 | 0.96895 | 0.999998 |
| Ctrl_NONESS_BPIFB3 | 23 | −0.61231 | 0.9756 | 0.99773 | 0.999998 |
| MAP3K7_HRD | 14 | −0.84379 | 0.99968 | 0.9997 | 0.999998 |
| PRAG1_VAIK | 17 | −0.9534 | 0.50171 | 0.81666 | 0.999998 |
| CDK5_HRD | 10 | −1.1121 | 0.775 | 0.90926 | 0.999998 |
| OBSCN_KD2_VAIK | 14 | −0.84417 | 0.51618 | 0.8119 | 0.999998 |
| SPEG_splice | 23 | −0.61456 | 0.93097 | 0.99228 | 0.999998 |
| BUB1B_HRD | 10 | −1.0849 | 0.825 | 0.94357 | 0.999998 |
| ACVRL1_splice | 21 | −0.80064 | 0.9955 | 0.99964 | 0.999998 |
| TRIB3_splice | 21 | −0.74447 | 0.30155 | 0.68946 | 0.999998 |
| RPS6KL1_VAIK | 12 | −0.81877 | 0.70526 | 0.90964 | 0.999998 |
| Ctrl_ESS_PSMB4 | 19 | −0.60101 | 0.70112 | 0.9392 | 0.999998 |
| TESK1_VAIK | 12 | −0.81354 | 0.52848 | 0.82025 | 0.999998 |
| TRIB1_VAIK | 14 | −0.61135 | 0.98724 | 0.99563 | 0.999998 |
| Ctrl_ESS_PUF60 | 21 | −0.77781 | 0.99084 | 0.99922 | 0.999998 |
| Ctrl_NONESS_CASP2 | 20 | −0.60753 | 0.57108 | 0.88669 | 0.999998 |
| BRSK1_HRD | 8 | −0.9436 | 0.050698 | 0.19441 | 0.804106 |
| DCLK1_HRDplus5 | 11 | −0.46293 | 0.987 | 0.99554 | 0.999998 |
| TRIB3_VAIK | 14 | −0.91471 | 0.99564 | 0.99794 | 0.999998 |
| MAPK15_HRDplus5 | 14 | −0.87391 | 0.16453 | 0.44913 | 0.975047 |
| CDK9_HRD | 13 | −0.88412 | 0.42777 | 0.72858 | 0.999998 |
| AATK_HRD | 10 | −0.60606 | 0.86571 | 0.95623 | 0.999998 |
| RPS6KA5_KD2_HRD | 9 | −1.2871 | 0.90104 | 0.95637 | 0.999998 |
| EIF2AK3_VAIK | 13 | −0.70741 | 0.73449 | 0.92215 | 0.999998 |
| PRKCB_splice | 17 | −0.79291 | 0.95256 | 0.99307 | 0.999998 |
| MAP2K3_HRD | 12 | −0.70558 | 0.98881 | 0.99395 | 0.999998 |
| PRKCH_VAIK | 14 | −0.75152 | 0.70355 | 0.90886 | 0.999998 |
| MAPK14_VAIK | 13 | −0.99297 | 0.47642 | 0.78495 | 0.999998 |
| PIM3_splice | 22 | −0.53147 | 0.99789 | 0.99979 | 0.999998 |
| ADCK5_DFG | 11 | −0.94426 | 0.99717 | 0.99726 | 0.999998 |
| ALPK2_HRD | 13 | −0.8112 | 0.94894 | 0.9822 | 0.999998 |
| TAOK2_HRD | 12 | −0.96455 | 0.95888 | 0.98479 | 0.999998 |
| Ctrl_ESS_ATP6V0C | 14 | −0.53237 | 0.87679 | 0.96898 | 0.999998 |
| MAP3K3_HRD | 13 | −0.52472 | 0.43788 | 0.73569 | 0.999998 |
| AXL_DFG | 13 | −0.77849 | 0.96945 | 0.98837 | 0.999998 |
| WEE1_DFG | 11 | −0.99895 | 0.99985 | 0.99986 | 0.999998 |
| Ctrl_NONESS_PRSS54 | 18 | −0.86419 | 0.44646 | 0.80392 | 0.999998 |
| Ctrl_ESS_RPL4 | 22 | −0.49547 | 0.95916 | 0.99593 | 0.999998 |
| MAP2K1_HRD | 13 | −0.68129 | 0.38986 | 0.70108 | 0.999998 |

| id | pos. rank | pos. goodsgrna | pos. lfc |
|---|---|---|---|
| RIPK2_VAIK | 2536 | 1 | −1.0661 |
| RYK_DFG | 2477 | 2 | −1.2509 |
| MAP3K9_HRDplus5 | 2568 | 0 | −0.98684 |
| MAP2K2_VAIK | 2421 | 1 | −0.94366 |
| Ctrl_ESS_PHB2 | 1831 | 9 | −0.51128 |
| PIK3C3_HRD | 2563 | 0 | −1.1199 |
| KSR1_splice | 1615 | 8 | −1.035 |
| ADCK1_VAIK | 1329 | 2 | −1.0004 |
| ERN1_VAIK | 2566 | 0 | −0.91263 |
| PRKDC_VAIK | 2271 | 4 | −0.84195 |
| ITPKC_HRD | 2573 | 0 | −0.96916 |
| CDK16_VAIK | 2372 | 2 | −1.0981 |
| Ctrl_NONESS_BPIFB3 | 2499 | 3 | −0.61231 |
| MAP3K7_HRD | 2564 | 0 | −0.84379 |
| PRAG1_VAIK | 1890 | 2 | −0.9534 |
| CDK5_HRD | 2247 | 1 | −1.1121 |
| OBSCN_KD2_VAIK | 1914 | 1 | −0.84417 |
| SPEG_splice | 2431 | 5 | −0.61456 |
| BUB1B_HRD | 2313 | 3 | −1.0849 |
| ACVRL1_splice | 2532 | 3 | −0.80064 |
| TRIB3_splice | 1517 | 6 | −0.74447 |
| RPS6KL1_VAIK | 2174 | 4 | −0.81877 |
| Ctrl_ESS_PSMB4 | 2167 | 4 | −0.60101 |
| TESK1_VAIK | 1925 | 4 | −0.81354 |
| TRIB1_VAIK | 2515 | 1 | −0.61135 |
| Ctrl_ESS_PUF60 | 2523 | 4 | −0.77781 |
| Ctrl_NONESS_CASP2 | 2009 | 5 | 0.60753 |
| BRSK1_HRD | 656 | 4 | −0.9436 |
| DCLK1_HRDplus5 | 2514 | 2 | −0.46293 |
| TRIB3_VAIK | 2533 | 1 | −0.91471 |
| MAPK15_HRDplus5 | 1190 | 4 | −0.87391 |
| CDK9_HRD | 1765 | 2 | −0.88412 |
| AATK_HRD | 2357 | 1 | −0.60606 |
| RPS6KA5_KD2_HRD | 2405 | 2 | −1.2871 |
| EIF2AK3_VAIK | 2203 | 2 | −0.70741 |
| PRKCB_splice | 2460 | 2 | −0.79291 |
| MAP2K3_HRD | 2520 | 1 | −0.70558 |
| PRKCH_VAIK | 2171 | 2 | −0.75152 |
| MAPK14_VAIK | 1853 | 3 | −0.99297 |
| PIM3_splice | 2542 | 1 | −0.53147 |
| ADCK5_DFG | 2539 | 1 | −0.94426 |
| ALPK2_HRD | 2455 | 2 | −0.8112 |
| TAOK2_HRD | 2471 | 1 | −0.96455 |
| Ctrl_ESS_ATP6V0C | 2373 | 1 | −0.53237 |
| MAP3K3_HRD | 1784 | 1 | −0.52472 |
| AXL_DFG | 2488 | 2 | −0.77849 |
| WEE1_DFG | 2570 | 0 | −0.99895 |
| Ctrl_NONESS_PRSS54 | 1795 | 6 | −0.86419 |
| Ctrl_ESS_RPL4 | 2473 | 4 | −0.49547 |
| MAP2K1_HRD | 1694 | 1 | −0.68129 |

The application's sequence listing, which the Patent Office published only in electronic form, follows.

SEQUENCE LISTING (10012 sequences)

SEQ ID NO: 1 - RNA, 20 nt, synthetic construct
  source 1..20: mol_type = other RNA
gtgactttggaagcgccacc

SEQ ID NO: 2 - RNA, 20 nt, synthetic construct
  source 1..20: mol_type = other RNA
tgtgactttggaagcgccac

SEQ ID NO: 3 - RNA, 20 nt, synthetic construct
  source 1..20: mol_type = other RNA
gtgtgactttggaagcgcca

SEQ ID NO: 4 - RNA, 20 nt, synthetic construct
  source 1..20: mol_type = other RNA
tgtgtgactttggaagcgcc

SEQ ID NO: 5 - RNA, 20 nt, synthetic construct
  source 1..20: mol_type = other RNA
ctgtgtgactttggaagcgc

SEQ ID NO: 6 - RNA, 20 nt, synthetic construct
  source 1..20: mol_type = other RNA
gggacctgaaggtacagacc

SEQ ID NO: 7 - RNA, 20 nt, synthetic construct
  source 1..20: mol_type = other RNA
cgggacctgaaggtacagac

SEQ ID NO: 8 - RNA, 20 nt, synthetic construct
  source 1..20: mol_type = other RNA
ccgggacctgaaggtacaga

SEQ ID NO: 9 - RNA, 20 nt, synthetic construct
  source 1..20: mol_type = other RNA
accgggacctgaaggtacag

SEQ ID NO: 10 - RNA, 20 nt, synthetic construct
  source 1..20: mol_type = other RNA
caccgggacctgaaggtaca

SEQ ID NO: 11 - RNA, 20 nt, synthetic construct
  source 1..20: mol_type = other RNA
aaaacatcctcttgcatgac

SEQ ID NO: 12 - RNA, 20 nt, synthetic construct
  source 1..20: mol_type = other RNA
gttgaaaacatcctcttgca

SEQ ID NO: 13 - RNA, 20 nt, synthetic construct
  source 1..20: mol_type = other RNA
gaaaacatcctcttgcatga

SEQ ID NO: 14 - RNA, 20 nt, synthetic construct
  source 1..20: mol_type = other RNA
tgaaaacatcctcttgcatg

SEQ ID NO: 15 - RNA, 20 nt, synthetic construct
  source 1..20: mol_type = other RNA
ttgaaaacatcctcttgcat

SEQ ID NO: 16 - RNA, 20 nt, synthetic construct
  source 1..20: mol_type = other RNA
ggttgaaaacatcctcttgc

SEQ ID NO: 17 - RNA, 20 nt, synthetic construct
  source 1..20: mol_type = other RNA
gaaacgcatgtttgtcaaca

SEQ ID NO: 18 - RNA, 20 nt, synthetic construct
  source 1..20: mol_type = other RNA
tgaaacgcatgtttgtcaac

SEQ ID NO: 19 - RNA, 20 nt, synthetic construct
  source 1..20: mol_type = other RNA
ttgaaacgcatgtttgtcaa

SEQ ID NO: 20 - RNA, 20 nt, synthetic construct
  source 1..20: mol_type = other RNA
cttgaaacgcatgtttgtca

SEQ ID NO: 21 - RNA, 20 nt, synthetic construct
  source 1..20: mol_type = other RNA
ccttgaaacgcatgtttgtc

SEQ ID NO: 22 - RNA, 20 nt, synthetic construct
  source 1..20: mol_type = other RNA
gccttgaaacgcatgtttgt

SEQ ID NO: 23 - RNA, 20 nt, synthetic construct
  source 1..20: mol_type = other RNA
tgccttgaaacgcatgtttg

SEQ ID NO: 24 - RNA, 20 nt, synthetic construct
  source 1..20: mol_type = other RNA
gtgactatggcctggctcac

SEQ ID NO: 25 - RNA, 20 nt, synthetic construct
  source 1..20: mol_type = other RNA
ggtgactatggcctggctca

SEQ ID NO: 26 - RNA, 20 nt, synthetic construct
  source 1..20: mol_type = other RNA
tggtgactatggcctggctc

SEQ ID NO: 27 - RNA, 20 nt, synthetic construct
  source 1..20: mol_type = other RNA
ttggtgactatggcctggct

SEQ ID NO: 28 - RNA, 20 nt, synthetic construct
  source 1..20: mol_type = other RNA
attggtgactatggcctggc

SEQ ID NO: 29 - RNA, 20 nt, synthetic construct
  source 1..20: mol_type = other RNA
gcgacctggccctgcggaac

SEQ ID NO: 30 - RNA, 20 nt, synthetic construct
  source 1..20: mol_type = other RNA
agcgacctggccctgcggaa

SEQ ID NO: 31 - RNA, 20 nt, synthetic construct
  source 1..20: mol_type = other RNA
cagcgacctggccctgcgga

SEQ ID NO: 32 - RNA, 20 nt, synthetic construct
  source 1..20: mol_type = other RNA
gcagcgacctggccctgcgg

SEQ ID NO: 33 - RNA, 20 nt, synthetic construct
  source 1..20: mol_type = other RNA
tgcagcgacctggccctgcg

SEQ ID NO: 34 - RNA, 20 nt, synthetic construct
  source 1..20: mol_type = other RNA
cggaactgcctgctcacggc

SEQ ID NO: 35 - RNA, 20 nt, synthetic construct
  source 1..20: mol_type = other RNA
ctgcggaactgcctgctcac

SEQ ID NO: 36 - RNA, 20 nt, synthetic construct
  source 1..20: mol_type = other RNA
cctgcggaactgcctgctca

SEQ ID NO: 37 - RNA, 20 nt, synthetic construct
  source 1..20: mol_type = other RNA
ggaactgcctgctcacggct

SEQ ID NO: 38 - RNA, 20 nt, synthetic construct
  source 1..20: mol_type = other RNA
gcggaactgcctgctcacgg

SEQ ID NO: 39 - RNA, 20 nt, synthetic construct
  source 1..20: mol_type = other RNA
tgcggaactgcctgctcacg

SEQ ID NO: 40 - RNA, 20 nt, synthetic construct
  source 1..20: mol_type = other RNA
gtgaaggagctgcaggctag

SEQ ID NO: 41 - RNA, 20 nt, synthetic construct
  source 1..20: mol_type = other RNA
tggtgaaggagctgcaggct

SEQ ID NO: 42 - RNA, 20 nt, synthetic construct
  source 1..20: mol_type = other RNA
tgaaggagctgcaggctagt

SEQ ID NO: 43 - RNA, 20 nt, synthetic construct
  source 1..20: mol_type = other RNA
ggtgaaggagctgcaggcta

SEQ ID NO: 44 - RNA, 20 nt, synthetic construct
  source 1..20: mol_type = other RNA
gtggtgaaggagctgcaggc

SEQ ID NO: 45 - RNA, 20 nt, synthetic construct
  source 1..20: mol_type = other RNA
ggtggtgaaggagctgcagg

SEQ ID NO: 46 - RNA, 20 nt, synthetic construct
  source 1..20: mol_type = other RNA
gagatcttgctgcccgaaac

SEQ ID NO: 47 - RNA, 20 nt, synthetic construct
  source 1..20: mol_type = other RNA
cttagagatcttgctgcccg

SEQ ID NO: 48 - RNA, 20 nt, synthetic construct
  source 1..20: mol_type = other RNA
ttagagatcttgctgcccga

SEQ ID NO: 49 - RNA, 20 nt, synthetic construct
  source 1..20: mol_type = other RNA
tagagatcttgctgcccgaa

SEQ ID NO: 50 - RNA, 20 nt, synthetic construct
  source 1..20: mol_type = other RNA
agagatcttgctgcccgaaa

SEQ ID NO: 51 - RNA, 20 nt, synthetic construct
  source 1..20: mol_type = other RNA
tgcccgaaactgcctggtag

SEQ ID NO: 52 - RNA, 20 nt, synthetic construct
  source 1..20: mol_type = other RNA
gcccgaaactgcctggtagg

SEQ ID NO: 53 - RNA, 20 nt, synthetic construct
  source 1..20: mol_type = other RNA
ccgaaactgcctggtagggg

SEQ ID NO: 54 - RNA, 20 nt, synthetic construct
  source 1..20: mol_type = other RNA
cccgaaactgcctggtaggg

SEQ ID NO: 55 - RNA, 20 nt, synthetic construct
  source 1..20: mol_type = other RNA
cgaaactgcctggtagggga

SEQ ID NO: 56 - RNA, 20 nt, synthetic construct
  source 1..20: mol_type = other RNA
gaaactgcctggtaggggag

SEQ ID NO: 57 - RNA, 20 nt, synthetic construct
  source 1..20: mol_type = other RNA
gccgtgaagaccttgaaggt

SEQ ID NO: 58 - RNA, 20 nt, synthetic construct
  source 1..20: mol_type = other RNA
ccgtgaagaccttgaaggta

SEQ ID NO: 59 - RNA, 20 nt, synthetic construct
  source 1..20: mol_type = other RNA
tgaagaccttgaaggtaggc

SEQ ID NO: 60 - RNA, 20 nt, synthetic construct
  source 1..20: mol_type = other RNA
ggccgtgaagaccttgaagg

SEQ ID NO: 61 - RNA, 20 nt, synthetic construct
  source 1..20: mol_type = other RNA
cgtgaagaccttgaaggtag

SEQ ID NO: 62 - RNA, 20 nt, synthetic construct
  source 1..20: mol_type = other RNA
gtgaagaccttgaaggtagg

SEQ ID NO: 63 - RNA, 20 nt, synthetic construct
  source 1..20: mol_type = other RNA
tggctgactttggcttaagt

SEQ ID NO: 64 - RNA, 20 nt, synthetic construct
  source 1..20: mol_type = other RNA
ctgactttggcttaagtaga

SEQ ID NO: 65 - RNA, 20 nt, synthetic construct
  source 1..20: mol_type = other RNA
gctgactttggcttaagtag

SEQ ID NO: 66 - RNA, 20 nt, synthetic construct
  source 1..20: mol_type = other RNA
ggctgactttggcttaagta

SEQ ID NO: 67 - RNA, 20 nt, synthetic construct
  source 1..20: mol_type = other RNA
gtggctgactttggcttaag

SEQ ID NO: 68 - RNA, 20 nt, synthetic construct
  source 1..20: mol_type = other RNA
gagatcttgcagctcgtaac

SEQ ID NO: 69 - RNA, 20 nt, synthetic construct
  source 1..20: mol_type = other RNA
agagatcttgcagctcgtaa

SEQ ID NO: 70 - RNA, 20 nt, synthetic construct
  source 1..20: mol_type = other RNA
cagagatcttgcagctcgta

SEQ ID NO: 71 - RNA, 20 nt, synthetic construct
  source 1..20: mol_type = other RNA
acagagatcttgcagctcgt

SEQ ID NO: 72 - RNA, 20 nt, synthetic construct
  source 1..20: mol_type = other RNA
cacagagatcttgcagctcg

SEQ ID NO: 73 - RNA, 20 nt, synthetic construct
  source 1..20: mol_type = other RNA
gctcgtaactgcctagtggg

SEQ ID NO: 74 - RNA, 20 nt, synthetic construct
  source 1..20: mol_type = other RNA
gtaactgcctagtgggagaa

SEQ ID NO: 75 - RNA, 20 nt, synthetic construct
  source 1..20: mol_type = other RNA
cgtaactgcctagtgggaga

SEQ ID NO: 76 - RNA, 20 nt, synthetic construct
  source 1..20: mol_type = other RNA
tcgtaactgcctagtgggag

SEQ ID NO: 77 - RNA, 20 nt, synthetic construct
  source 1..20: mol_type = other RNA
ctcgtaactgcctagtggga

SEQ ID NO: 78 - RNA, 20 nt, synthetic construct
  source 1..20: mol_type = other RNA
agctcgtaactgcctagtgg

SEQ ID NO: 79 - RNA, 20 nt, synthetic construct
  source 1..20: mol_type = other RNA
tgaaaacattgaaggtgggt

SEQ ID NO: 80 - RNA, 20 nt, synthetic construct
  source 1..20: mol_type = other RNA
ctgtgaaaacattgaaggtg

SEQ ID NO: 81 - RNA, 20 nt, synthetic construct
  source 1..20: mol_type = other RNA
gctgtgaaaacattgaaggt

SEQ ID NO: 82 - RNA, 20 nt, synthetic construct
  source 1..20: mol_type = other RNA
tgctgtgaaaacattgaagg

SEQ ID NO: 83 - RNA, 20 nt, synthetic construct
  source 1..20: mol_type = other RNA
gaaaacattgaaggtgggtt

SEQ ID NO: 84 - RNA, 20 nt, synthetic construct
  source 1..20: mol_type = other RNA
gtgaaaacattgaaggtggg

SEQ ID NO: 85 - RNA, 20 nt, synthetic construct
  source 1..20: mol_type = other RNA
tgtgaaaacattgaaggtgg

SEQ ID NO: 86 - RNA, 20 nt, synthetic construct
  source 1..20: mol_type = other RNA
gtccttgactgggaactttc

SEQ ID NO: 87 - RNA, 20 nt, synthetic construct
  source 1..20: mol_type = other RNA
tccttgactgggaactttct

SEQ ID NO: 88 - RNA, 20 nt, synthetic construct
  source 1..20: mol_type = other RNA
ccttgactgggaactttcta

SEQ ID NO: 89 - RNA, 20 nt, synthetic construct
  source 1..20: mol_type = other RNA
cttgactgggaactttctac

SEQ ID NO: 90 - RNA, 20 nt, synthetic construct
  source 1..20: mol_type = other RNA
ttgactgggaactttctacc

SEQ ID NO: 91 - RNA, 20 nt, synthetic construct
  source 1..20: mol_type = other RNA
acggggacttcaggtagatg

SEQ ID NO: 92 - RNA, 20 nt, synthetic construct
  source 1..20: mol_type = other RNA
cggggacttcaggtagatgt

SEQ ID NO: 93 - RNA, 20 nt, synthetic construct
  source 1..20: mol_type = other RNA
gggacttcaggtagatgtgg

SEQ ID NO: 94 - RNA, 20 nt, synthetic construct
  source 1..20: mol_type = other RNA
cacggggacttcaggtagat

SEQ ID NO: 95 - RNA, 20 nt, synthetic construct
  source 1..20: mol_type = other RNA
ggggacttcaggtagatgtg

SEQ ID NO: 96 - RNA, 20 nt, synthetic construct
  source 1..20: mol_type = other RNA
gacaacctggtgtttcatcc

SEQ ID NO: 97 - RNA, 20 nt, synthetic construct
  source 1..20: mol_type = other RNA
gctcgacaacctggtgtttc

SEQ ID NO: 98 - RNA, 20 nt, synthetic construct
  source 1..20: mol_type = other RNA
ctcgacaacctggtgtttca

SEQ ID NO: 99 - RNA, 20 nt, synthetic construct
  source 1..20: mol_type = other RNA
tcgacaacctggtgtttcat

SEQ ID NO: 100 - RNA, 20 nt, synthetic construct
  source 1..20: mol_type = other RNA
cgacaacctggtgtttcatc

SEQ ID NO: 101 - RNA, 20 nt, synthetic construct
  source 1..20: mol_type = other RNA
acaacctggtgtttcatcca

SEQ ID NO: 102 - RNA, 20 nt, synthetic construct
  source 1..20: mol_type = other RNA
tggattgggagctgtcaacc

SEQ ID NO: 103 - RNA, 20 nt, synthetic construct
  source 1..20: mol_type = other RNA
ctggattgggagctgtcaac

SEQ ID NO: 104 - RNA, 20 nt, synthetic construct
  source 1..20: mol_type = other RNA
gctggattgggagctgtcaa

SEQ ID NO: 105 - RNA, 20 nt, synthetic construct
  source 1..20: mol_type = other RNA
tgctggattgggagctgtca

SEQ ID NO: 106 - RNA, 20 nt, synthetic construct
  source 1..20: mol_type = other RNA
gtgctggattgggagctgtc

SEQ ID NO: 107 - RNA, 20 nt, synthetic construct
  source 1..20: mol_type = other RNA
gagatttcagactagataac

SEQ ID NO: 108 - RNA, 20 nt, synthetic construct
  source 1..20: mol_type = other RNA
ggagatttcagactagataa

SEQ ID NO: 109 - RNA, 20 nt, synthetic construct
  source 1..20: mol_type = other RNA
tggagatttcagactagata

SEQ ID NO: 110 - RNA, 20 nt, synthetic construct
  source 1..20: mol_type = other RNA
atggagatttcagactagat

SEQ ID NO: 111 - RNA, 20 nt, synthetic construct
  source 1..20: mol_type = other RNA
catggagatttcagactaga

SEQ ID NO: 112 - RNA, 20 nt, synthetic construct
  source 1..20: mol_type = other RNA
cagatttgggtaaatttcta

SEQ ID NO: 113 - RNA, 20 nt, synthetic construct
  source 1..20: mol_type = other RNA
gcagatttgggtaaatttct

SEQ ID NO: 114 - RNA, 20 nt, synthetic construct
  source 1..20: mol_type = other RNA
agcagatttgggtaaatttc

SEQ ID NO: 115 - RNA, 20 nt, synthetic construct
  source 1..20: mol_type = other RNA
tagcagatttgggtaaattt

SEQ ID NO: 116 - RNA, 20 nt, synthetic construct
  source 1..20: mol_type = other RNA
atagcagatttgggtaaatt

SEQ ID NO: 117 - RNA, 20 nt, synthetic construct
  source 1..20: mol_type = other RNA
tcgagatttaaagagcaaaa

SEQ ID NO: 118 - RNA, 20 nt, synthetic construct
  source 1..20: mol_type = other RNA
atcgagatttaaagagcaaa

SEQ ID NO: 119 - RNA, 20 nt, synthetic construct
  source 1..20: mol_type = other RNA
catcgagatttaaagagcaa

SEQ ID NO: 120 - RNA, 20 nt, synthetic construct
  source 1..20: mol_type = other RNA
aaaatattctggttaagaag

SEQ ID NO: 121 - RNA, 20 nt, synthetic construct
  source 1..20: mol_type = other RNA
gtgaagatcttctcctcccg

SEQ ID NO: 122 - RNA, 20 nt, synthetic construct
  source 1..20: mol_type = other RNA
ccgtgaagatcttctcctcc

SEQ ID NO: 123 - RNA, 20 nt, synthetic construct
  source 1..20: mol_type = other RNA
tgaagatcttctcctcccgt

SEQ ID NO: 124 - RNA, 20 nt, synthetic construct
  source 1..20: mol_type = other RNA
cgtgaagatcttctcctccc

SEQ ID NO: 125 - RNA, 20 nt, synthetic construct
  source 1..20: mol_type = other RNA
gccgtgaagatcttctcctc

SEQ ID NO: 126 - RNA, 20 nt, synthetic construct
  source 1..20: mol_type = other RNA
tgccgtgaagatcttctcct

SEQ ID NO: 127 - RNA, 20 nt, synthetic construct
  source 1..20: mol_type = other RNA
atagcagacctgggcctggc

SEQ ID NO: 128 - RNA, 20 nt, synthetic construct
  source 1..20: mol_type = other RNA
cagacctgggcctggctgtc

SEQ ID NO: 129 - RNA, 20 nt, synthetic construct
  source 1..20: mol_type = other RNA
tagcagacctgggcctggct

SEQ ID NO: 130 - RNA, 20 nt, synthetic construct
  source 1..20: mol_type = other RNA
agcagacctgggcctggctg

SEQ ID NO: 131 - RNA, 20 nt, synthetic construct
  source 1..20: mol_type = other RNA
gcagacctgggcctggctgt

SEQ ID NO: 132 - RNA, 20 nt, synthetic construct
  source 1..20: mol_type = other RNA
gagacttaaagtcaaagaac

SEQ ID NO: 133 - RNA, 20 nt, synthetic construct
  source 1..20: mol_type = other RNA
catcgagacttaaagtcaaa

SEQ ID NO: 134 - RNA, 20 nt, synthetic construct
  source 1..20: mol_type = other RNA
atcgagacttaaagtcaaag

SEQ ID NO: 135 - RNA, 20 nt, synthetic construct
  source 1..20: mol_type = other RNA
tcgagacttaaagtcaaaga

SEQ ID NO: 136 - RNA, 20 nt, synthetic construct
  source 1..20: mol_type = other RNA
cgagacttaaagtcaaagaa

SEQ ID NO: 137 - RNA, 20 nt, synthetic construct
  source 1..20: mol_type = other RNA
gtcaaagaacattctggtga

SEQ ID NO: 138 - RNA, 20 nt, synthetic construct
  source 1..20: mol_type = other RNA
tcaaagaacattctggtgaa

SEQ ID NO: 139 - RNA, 20 nt, synthetic construct
  source 1..20: mol_type = other RNA
caaagaacattctggtgaag

SEQ ID NO: 140 - RNA, 20 nt, synthetic construct
  source 1..20: mol_type = other RNA
aaagaacattctggtgaaga

SEQ ID NO: 141 - RNA, 20 nt, synthetic construct
  source 1..20: mol_type = other RNA
aagaacattctggtgaagaa

SEQ ID NO: 142 - RNA, 20 nt, synthetic construct
  source 1..20: mol_type = other RNA
agaacattctggtgaagaaa

SEQ ID NO: 143 - RNA, 20 nt, synthetic construct
  source 1..20: mol_type = other RNA
ctgtgaaaatattctcttct

SEQ ID NO: 144 - RNA, 20 nt, synthetic construct
  source 1..20: mol_type = other RNA
gtgaaaatattctcttctcg

SEQ ID NO: 145 - RNA, 20 nt, synthetic construct
  source 1..20: mol_type = other RNA
ggctgtgaaaatattctctt

SEQ ID NO: 146 - RNA, 20 nt, synthetic construct
  source 1..20: mol_type = other RNA
gctgtgaaaatattctcttc

SEQ ID NO: 147 - RNA, 20 nt, synthetic construct
  source 1..20: mol_type = other RNA
tgtgaaaatattctcttctc

SEQ ID NO: 148 - RNA, 20 nt, synthetic construct
  source 1..20: mol_type = other RNA
tgaaaatattctcttctcgt

SEQ ID NO: 149 - RNA, 20 nt, synthetic construct
  source 1..20: mol_type = other RNA
gaaaatattctcttctcgtg

SEQ ID NO: 150 - RNA, 20 nt, synthetic construct
  source 1..20: mol_type = other RNA
agcggacttagggttggctg

SEQ ID NO: 151 - RNA, 20 nt, synthetic construct
  source 1..20: mol_type = other RNA
atagcggacttagggttggc

SEQ ID NO: 152 - RNA, 20 nt, synthetic construct
  source 1..20: mol_type = other RNA
cggacttagggttggctgtg

SEQ ID NO: 153 - RNA, 20 nt, synthetic construct
  source 1..20: mol_type = other RNA
gcggacttagggttggctgt

SEQ ID NO: 154 - RNA, 20 nt, synthetic construct
  source 1..20: mol_type = other RNA
tagcggacttagggttggct

SEQ ID NO: 155 - RNA, 20 nt, synthetic construct
  source 1..20: mol_type = other RNA
gagacataaaatcaaagaat

SEQ ID NO: 156 - RNA, 20 nt, synthetic construct
  source 1..20: mol_type = other RNA
cgagacataaaatcaaagaa

SEQ ID NO: 157 - RNA, 20 nt, synthetic construct
  source 1..20: mol_type = other RNA
tcgagacataaaatcaaaga

SEQ ID NO: 158 - RNA, 20 nt, synthetic construct
  source 1..20: mol_type = other RNA
atcgagacataaaatcaaag

SEQ ID NO: 159 - RNA, 20 nt, synthetic construct
  source 1..20: mol_type = other RNA
catcgagacataaaatcaaa

SEQ ID NO: 160 - RNA, 20 nt, synthetic construct
  source 1..20: mol_type = other RNA
aaagaatatcttagtgaaaa

SEQ ID NO: 161 - RNA, 20 nt, synthetic construct
  source 1..20: mol_type = other RNA
caaagaatatcttagtgaaa

SEQ ID NO: 162 - RNA, 20 nt, synthetic construct
  source 1..20: mol_type = other RNA
tcaaagaatatcttagtgaa

SEQ ID NO: 163 - RNA, 20 nt, synthetic construct
  source 1..20: mol_type = other RNA
atcaaagaatatcttagtga

SEQ ID NO: 164 - RNA, 20 nt, synthetic construct
  source 1..20: mol_type = other RNA
gtgaaaatattctcctccag

SEQ ID NO: 165 - RNA, 20 nt, synthetic construct
  source 1..20: mol_type = other RNA
ctgtgaaaatattctcctcc

SEQ ID NO: 166 - RNA, 20 nt, synthetic construct
  source 1..20: mol_type = other RNA
gaaaatattctcctccagag

SEQ ID NO: 167 - RNA, 20 nt, synthetic construct
  source 1..20: mol_type = other RNA
tgaaaatattctcctccaga

SEQ ID NO: 168 - RNA, 20 nt, synthetic construct
  source 1..20: mol_type = other RNA
tgtgaaaatattctcctcca

SEQ ID NO: 169 - RNA, 20 nt, synthetic construct
  source 1..20: mol_type = other RNA
gctgtgaaaatattctcctc

SEQ ID NO: 170 - RNA, 20 nt, synthetic construct
  source 1..20: mol_type = other RNA
ggctgtgaaaatattctcct

SEQ ID NO: 171 - RNA, 20 nt, synthetic construct
  source 1..20: mol_type = other RNA
attgctgactttgggttggc

SEQ ID NO: 172 - RNA, 20 nt, synthetic construct
  source 1..20: mol_type = other RNA
ttgctgactttgggttggcc

SEQ ID NO: 173 - RNA, 20 nt, synthetic construct
  source 1..20: mol_type = other RNA
tgctgactttgggttggcct

SEQ ID NO: 174 - RNA, 20 nt, synthetic construct
  source 1..20: mol_type = other RNA
gctgactttgggttggcctt

SEQ ID NO: 175 - RNA, 20 nt, synthetic construct
  source 1..20: mol_type = other RNA
ctgactttgggttggcctta

SEQ ID NO: 176 - RNA, 20 nt, synthetic construct
  source 1..20: mol_type = other RNA
gcaagggacatcaaaagtaa

SEQ ID NO: 177 - RNA, 20 nt, synthetic construct
  source 1..20: mol_type = other RNA
caagggacatcaaaagtaaa

SEQ ID NO: 178 - RNA, 20 nt, synthetic construct
  source 1..20: mol_type = other RNA
aagggacatcaaaagtaaaa

SEQ ID NO: 179 - RNA, 20 nt, synthetic construct
  source 1..20: mol_type = other RNA
tgtcaaaatatttccaatac

SEQ ID NO: 180 - RNA, 20 nt, synthetic construct
  source 1..20: mol_type = other RNA
gtcaaaatatttccaataca

SEQ ID NO: 181 - RNA, 20 nt, synthetic construct
  source 1..20: mol_type = other RNA
ggctgtcaaaatatttccaa

SEQ ID NO: 182 - RNA, 20 nt, synthetic construct
  source 1..20: mol_type = other RNA
gctgtcaaaatatttccaat

SEQ ID NO: 183 - RNA, 20 nt, synthetic construct
  source 1..20: mol_type = other RNA
ctgtcaaaatatttccaata

SEQ ID NO: 184 - RNA, 20 nt, synthetic construct
  source 1..20: mol_type = other RNA
tcaaaatatttccaatacag

SEQ ID NO: 185 - RNA, 20 nt, synthetic construct
  source 1..20: mol_type = other RNA
caaaatatttccaatacagg

SEQ ID NO: 186 - RNA, 20 nt, synthetic construct
  source 1..20: mol_type = other RNA
ctggctgactttggcttggc

SEQ ID NO: 187 - RNA, 20 nt, synthetic construct
  source 1..20: mol_type = other RNA
ctgactttggcttggctgtt

SEQ ID NO: 188 - RNA, 20 nt, synthetic construct
  source 1..20: mol_type = other RNA
tggctgactttggcttggct

SEQ ID NO: 189 - RNA, 20 nt, synthetic construct
  source 1..20: mol_type = other RNA
ggctgactttggcttggctg

SEQ ID NO: 190 - RNA, 20 nt, synthetic construct
  source 1..20: mol_type = other RNA
gctgactttggcttggctgt

SEQ ID NO: 191 - RNA, 20 nt, synthetic construct
  source 1..20: mol_type = other RNA
agggactttaaaagtaagaa

SEQ ID NO: 192 - RNA, 20 nt, synthetic construct
  source 1..20: mol_type = other RNA
cacagggactttaaaagtaa

SEQ ID NO: 193 - RNA, 20 nt, synthetic construct
  source 1..20: mol_type = other RNA
acagggactttaaaagtaag

SEQ ID NO: 194 - RNA, 20 nt, synthetic construct
  source 1..20: mol_type = other RNA
cagggactttaaaagtaaga

SEQ ID NO: 195 - RNA, 20 nt, synthetic construct
  source 1..20: mol_type = other RNA
gggactttaaaagtaagaat

SEQ ID NO: 196 - RNA, 20 nt, synthetic construct
  source 1..20: mol_type = other RNA
aagtaagaatgtattgctga

SEQ ID NO: 197 - RNA, 20 nt, synthetic construct
  source 1..20: mol_type = other RNA
gtaagaatgtattgctgaag

SEQ ID NO: 198 - RNA, 20 nt, synthetic construct
  source 1..20: mol_type = other RNA
aagaatgtattgctgaagag

SEQ ID NO: 199 - RNA, 20 nt, synthetic construct
  source 1..20: mol_type = other RNA
agtaagaatgtattgctgaa

SEQ ID NO: 200 - RNA, 20 nt, synthetic construct
  source 1..20: mol_type = other RNA
taagaatgtattgctgaaga

SEQ ID NO: 201 - RNA, 20 nt, synthetic construct
  source 1..20: mol_type = other RNA
agaatgtattgctgaagagc

SEQ ID NO: 202 - RNA, 20 nt, synthetic construct
  source 1..20: mol_type = other RNA
tgtcaagatcttcccactcc

SEQ ID NO: 203 - RNA, 20 nt, synthetic construct
  source 1..20: mol_type = other RNA
gtcaagatcttcccactcca

SEQ ID NO: 204 - RNA, 20 nt, synthetic construct
  source 1..20: mol_type = other RNA
agctgtcaagatcttcccac

SEQ ID NO: 205 - RNA, 20 nt, synthetic construct
  source 1..20: mol_type = other RNA
gctgtcaagatcttcccact

SEQ ID NO: 206 - RNA, 20 nt, synthetic construct
  source 1..20: mol_type = other RNA
ctgtcaagatcttcccactc

SEQ ID NO: 207 - RNA, 20 nt, synthetic construct
  source 1..20: mol_type = other RNA
tcaagatcttcccactccag

SEQ ID NO: 208 - RNA, 20 nt, synthetic construct
  source 1..20: mol_type = other RNA
atcgccgacctgggtgagcc

SEQ ID NO: 209 - RNA, 20 nt, synthetic construct
  source 1..20: mol_type = other RNA
tcgccgacctgggtgagccg

SEQ ID NO: 210 - RNA, 20 nt, synthetic construct
  source 1..20: mol_type = other RNA
gccgacctgggtgagccggg

SEQ ID NO: 211 - RNA, 20 nt, synthetic construct
  source 1..20: mol_type = other RNA
ccgacctgggtgagccgggc

SEQ ID NO: 212 - RNA, 20 nt, synthetic construct
  source 1..20: mol_type = other RNA
cgccgacctgggtgagccgg

SEQ ID NO: 213 - RNA, 20 nt, synthetic construct
  source 1..20: mol_type = other RNA
cgcgacttcaagagccgcaa

SEQ ID NO: 214 - RNA, 20 nt, synthetic construct
  source 1..20: mol_type = other RNA
caccgcgacttcaagagccg

SEQ ID NO: 215 - RNA, 20 nt, synthetic construct
  source 1..20: mol_type = other RNA
accgcgacttcaagagccgc

SEQ ID NO: 216 - RNA, 20 nt, synthetic construct
  source 1..20: mol_type = other RNA
ccgcgacttcaagagccgca

SEQ ID NO: 217 - RNA, 20 nt, synthetic construct
  source 1..20: mol_type = other RNA
gcgacttcaagagccgcaat

SEQ ID NO: 218 - RNA, 20 nt, synthetic construct
  source 1..20: mol_type = other RNA
gagccgcaatgtgctggtca

SEQ ID NO: 219 - RNA, 20 nt, synthetic construct
  source 1..20: mol_type = other RNA
gccgcaatgtgctggtcaag

SEQ ID NO: 220 - RNA, 20 nt, synthetic construct
  source 1..20: mol_type = other RNA
agccgcaatgtgctggtcaa

SEQ ID NO: 221 - RNA, 20 nt, synthetic construct
  source 1..20: mol_type = other RNA
ccgcaatgtgctggtcaaga

SEQ ID NO: 222 - RNA, 20 nt, synthetic construct
  source 1..20: mol_type = other RNA
cgcaatgtgctggtcaagag

SEQ ID NO: 223 - RNA, 20 nt, synthetic construct
  source 1..20: mol_type = other RNA
gcaatgtgctggtcaagagc

SEQ ID NO: 224 - RNA, 20 nt, synthetic construct
  source 1..20: mol_type = other RNA
ggccgtcaagatcttctcct

SEQ ID NO: 225 - RNA, 20 nt, synthetic construct
  source 1..20: mol_type = other RNA
ccgtcaagatcttctcctcg

SEQ ID NO: 226 - RNA, 20 nt, synthetic construct
  source 1..20: mol_type = other RNA
cgtcaagatcttctcctcga

SEQ ID NO: 227 - RNA, 20 nt, synthetic construct
  source 1..20: mol_type = other RNA
gtcaagatcttctcctcgag

SEQ ID NO: 228 - RNA, 20 nt, synthetic construct
  source 1..20: mol_type = other RNA
gccgtcaagatcttctcctc

SEQ ID NO: 229 - RNA, 20 nt, synthetic construct
  source 1..20: mol_type = other RNA
tcaagatcttctcctcgagg

SEQ ID NO: 230 - RNA, 20 nt, synthetic construct
  source 1..20: mol_type = other RNA
gttggaccatgggctttacc

SEQ ID NO: 231 - RNA, 20 nt, synthetic construct
  source 1..20: mol_type = other RNA
ttggaccatgggctttacca

SEQ ID NO: 232 - RNA, 20 nt, synthetic construct
  source 1..20: mol_type = other RNA
ctgttggaccatgggcttta

SEQ ID NO: 233 - RNA, 20 nt, synthetic construct
  source 1..20: mol_type = other RNA
tgttggaccatgggctttac

SEQ ID NO: 234 - RNA, 20 nt, synthetic construct
  source 1..20: mol_type = other RNA
tggaccatgggctttaccag

SEQ ID NO: 235 - RNA, 20 nt, synthetic construct
  source 1..20: mol_type = other RNA
tgcgatccccaccccggcaa

SEQ ID NO: 236 - RNA, 20 nt, synthetic construct
  source 1..20: mol_type = other RNA
cactgcgatccccaccccgg

SEQ ID NO: 237 - RNA, 20 nt, synthetic construct
  source 1..20: mol_type = other RNA
actgcgatccccaccccggc

SEQ ID NO: 238 - RNA, 20 nt, synthetic construct
  source 1..20: mol_type = other RNA
ctgcgatccccaccccggca

SEQ ID NO: 239 - RNA, 20 nt, synthetic construct
  source 1..20: mol_type = other RNA
gcgatccccaccccggcaat

SEQ ID NO: 240 - RNA, 20 nt, synthetic construct
  source 1..20: mol_type = other RNA
ccccggcaatgtactggtgc

SEQ ID NO: 241 - RNA, 20 nt, synthetic construct
  source 1..20: mol_type = other RNA
cggcaatgtactggtgcgga

SEQ ID NO: 242 - RNA, 20 nt, synthetic construct
  source 1..20: mol_type = other RNA
cccggcaatgtactggtgcg

SEQ ID NO: 243 - RNA, 20 nt, synthetic construct
  source 1..20: mol_type = other RNA
ccggcaatgtactggtgcgg

SEQ ID NO: 244 - RNA, 20 nt, synthetic construct
  source 1..20: mol_type = other RNA
ggcaatgtactggtgcggaa

SEQ ID NO: 245 - RNA, 20 nt, synthetic construct
  source 1..20: mol_type = other RNA
gcaatgtactggtgcggaag

SEQ ID NO: 246 - RNA, 20 nt, synthetic construct
  source 1..20: mol_type = other RNA
cgtgaaggtccagcacccaa

SEQ ID NO: 247 - RNA, 20 nt, synthetic construct
  source 1..20: mol_type = other RNA
gtgaaggtccagcacccaaa

SEQ ID NO: 248 - RNA, 20 nt, synthetic construct
  source 1..20: mol_type = other RNA
ggccgtgaaggtccagcacc

SEQ ID NO: 249 - RNA, 20 nt, synthetic construct
  source 1..20: mol_type = other RNA
gccgtgaaggtccagcaccc

SEQ ID NO: 250 - RNA, 20 nt, synthetic construct
  source 1..20: mol_type = other RNA
ccgtgaaggtccagcaccca

SEQ ID NO: 251 - RNA, 20 nt, synthetic construct
  source 1..20: mol_type = other RNA
tgaaggtccagcacccaaag

SEQ ID NO: 252 - RNA, 20 nt, synthetic construct
  source 1..20: mol_type = other RNA
ctgctggatgctggcattgt

SEQ ID NO: 253 - RNA, 20 nt, synthetic construct
  source 1..20: mol_type = other RNA
gctggatgctggcattgtgg

SEQ ID NO: 254 - RNA, 20 nt, synthetic construct
  source 1..20: mol_type = other RNA
ctggatgctggcattgtggc

SEQ ID NO: 255 - RNA, 20 nt, synthetic construct
  source 1..20: mol_type = other RNA
tgctggatgctggcattgtg

SEQ ID NO: 256 - RNA, 20 nt, synthetic construct
  source 1..20: mol_type = other RNA
tggatgctggcattgtggcg

SEQ ID NO: 257 - RNA, 20 nt, synthetic construct
  source 1..20: mol_type = other RNA
catgcagaccttcaccctgg

SEQ ID NO: 258 - RNA, 20 nt, synthetic construct
  source 1..20: mol_type = other RNA
atgcagaccttcaccctgga

SEQ ID NO: 259 - RNA, 20 nt, synthetic construct
  source 1..20: mol_type = other RNA
tgcagaccttcaccctggaa

SEQ ID NO: 260 - RNA, 20 nt, synthetic construct
  source 1..20: mol_type = other RNA
gcagaccttcaccctggaaa

SEQ ID NO: 261 - RNA, 20 nt, synthetic construct
  source 1..20: mol_type = other RNA
cagaccttcaccctggaaac

SEQ ID NO: 262 - RNA, 20 nt, synthetic construct
  source 1..20: mol_type = other RNA
ccctggaaacatcctggttc

SEQ ID NO: 263 - RNA, 20 nt, synthetic construct
  source 1..20: mol_type = other RNA
cctggaaacatcctggttca

SEQ ID NO: 264 - RNA, 20 nt, synthetic construct
  source 1..20: mol_type = other RNA
ctggaaacatcctggttcag

SEQ ID NO: 265 - RNA, 20 nt, synthetic construct
  source 1..20: mol_type = other RNA
ggaaacatcctggttcaggg

SEQ ID NO: 266 - RNA, 20 nt, synthetic construct
  source 1..20: mol_type = other RNA
tggaaacatcctggttcagg

SEQ ID NO: 267 - RNA, 20 nt, synthetic construct
  source 1..20: mol_type = other RNA
gaaacatcctggttcagggt

SEQ ID NO: 268 - RNA, 20 nt, synthetic construct
  source 1..20: mol_type = other RNA
ggcagtgaaagtaagtgttg

SEQ ID NO: 269 - RNA, 20 nt, synthetic construct
  source 1..20: mol_type = other RNA
cagtgaaagtaagtgttgtg

SEQ ID NO: 270 - RNA, 20 nt, synthetic construct
  source 1..20: mol_type = other RNA
gtgaaagtaagtgttgtgag

SEQ ID NO: 271 - RNA, 20 nt, synthetic construct
  source 1..20: mol_type = other RNA
gcagtgaaagtaagtgttgt

SEQ ID NO: 272 - RNA, 20 nt, synthetic construct
  source 1..20: mol_type = other RNA
agtgaaagtaagtgttgtga

SEQ ID NO: 273 - RNA, 20 nt, synthetic construct
  source 1..20: mol_type = other RNA
tgaaagtaagtgttgtgaga

SEQ ID NO: 274 - RNA, 20 nt, synthetic construct
  source 1..20: mol_type = other RNA
gaaagtaagtgttgtgagag

SEQ ID NO: 275 - RNA, 20 nt, synthetic construct
  source 1..20: mol_type = other RNA
gctggaccacgggctctacc

SEQ ID NO: 276 - RNA, 20 nt, synthetic construct
  source 1..20: mol_type = other RNA
ctgctggaccacgggctcta

SEQ ID NO: 277 - RNA, 20 nt, synthetic construct
  source 1..20: mol_type = other RNA
tgctggaccacgggctctac

SEQ ID NO: 278 - RNA, 20 nt, synthetic construct
  source 1..20: mol_type = other RNA
ctggaccacgggctctacca

SEQ ID NO: 279 - RNA, 20 nt, synthetic construct
  source 1..20: mol_type = other RNA
tggaccacgggctctaccag

SEQ ID NO: 280 - RNA, 20 nt, synthetic construct
  source 1..20: mol_type = other RNA
tcggacccacatcctggcaa

SEQ ID NO: 281 - RNA, 20 nt, synthetic construct
  source 1..20: mol_type = other RNA
cggacccacatcctggcaac

SEQ ID NO: 282 - RNA, 20 nt, synthetic construct
  source 1..20: mol_type = other RNA
cactcggacccacatcctgg

SEQ ID NO: 283 - RNA, 20 nt, synthetic construct
  source 1..20: mol_type = other RNA
actcggacccacatcctggc

SEQ ID NO: 284 - RNA, 20 nt, synthetic construct
  source 1..20: mol_type = other RNA
ctcggacccacatcctggca

SEQ ID NO: 285 - RNA, 20 nt, synthetic construct
  source 1..20: mol_type = other RNA
tcctggcaacggtaggaatt

SEQ ID NO: 286 - RNA, 20 nt, synthetic construct
  source 1..20: mol_type = other RNA
cctggcaacggtaggaattt

SEQ ID NO: 287 - RNA, 20 nt, synthetic construct
  source 1..20: mol_type = other RNA
ctggcaacggtaggaattta

SEQ ID NO: 288 - RNA, 20 nt, synthetic construct
  source 1..20: mol_type = other RNA
tggcaacggtaggaatttac

SEQ ID NO: 289 - RNA, 20 nt, synthetic construct
  source 1..20: mol_type = other RNA
ggcaacggtaggaatttacc

SEQ ID NO: 290 - RNA, 20 nt, synthetic construct
  source 1..20: mol_type = other RNA
gcaacggtaggaatttaccc

SEQ ID NO: 291 - RNA, 20 nt, synthetic construct
  source 1..20: mol_type = other RNA
ggctgtgaaggtatatgggg

SEQ ID NO: 292 - RNA, 20 nt, synthetic construct
  source 1..20: mol_type = other RNA
acagacttcgggctgtgcaa

SEQ ID NO: 293 - RNA, 20 nt, synthetic construct
  source 1..20: mol_type = other RNA
cacagacttcgggctgtgca

SEQ ID NO: 294 - RNA, 20 nt, synthetic construct
  source 1..20: mol_type = other RNA
cagacttcgggctgtgcaag

SEQ ID NO: 295 - RNA, 20 nt, synthetic construct
  source 1..20: mol_type = other RNA
tcacagacttcgggctgtgc

SEQ ID NO: 296 - RNA, 20 nt, synthetic construct
  source 1..20: mol_type = other RNA
atcacagacttcgggctgtg

SEQ ID NO: 297 - RNA, 20 nt, synthetic construct
  source 1..20: mol_type = other RNA
gggacctcaaggtgcgctgg

SEQ ID NO: 298 - RNA, 20 nt, synthetic construct
  source 1..20: mol_type = other RNA
ccgggacctcaaggtgcgct

SEQ ID NO: 299 - RNA, 20 nt, synthetic construct
  source 1..20: mol_type = other RNA
accgggacctcaaggtgcgc

SEQ ID NO: 300 - RNA, 20 nt, synthetic construct
  source 1..20: mol_type = other RNA
cgggacctcaaggtgcgctg

SEQ ID NO: 301 - RNA, 20 nt, synthetic construct
  source 1..20: mol_type = other RNA
taccgggacctcaaggtgcg

SEQ ID NO: 302 - RNA, 20 nt, synthetic construct
  source 1..20: mol_type = other RNA
gagaacctcatgctggacaa

SEQ ID NO: 303 - RNA, 20 nt, synthetic construct
  source 1..20: mol_type = other RNA
ggagaacctcatgctggaca

SEQ ID NO: 304 - RNA, 20 nt, synthetic construct
  source 1..20: mol_type = other RNA
agaacctcatgctggacaag

SEQ ID NO: 305 - RNA, 20 nt, synthetic construct
  source 1..20: mol_type = other RNA
tggagaacctcatgctggac

SEQ ID NO: 306 - RNA, 20 nt, synthetic construct
  source 1..20: mol_type = other RNA
ctggagaacctcatgctgga

SEQ ID NO: 307 - RNA, 20 nt, synthetic construct
  source 1..20: mol_type = other RNA
gctggagaacctcatgctgg

SEQ ID NO: 308 - RNA, 20 nt, synthetic construct
  source 1..20: mol_type = other RNA
atgaagatcctcaagaagga

SEQ ID NO: 309 - RNA, 20 nt, synthetic construct
  source 1..20: mol_type = other RNA
gccatgaagatcctcaagaa

SEQ ID NO: 310 - RNA, 20 nt, synthetic construct
  source 1..20: mol_type = other RNA
cgccatgaagatcctcaaga

SEQ ID NO: 311 - RNA, 20 nt, synthetic construct
  source 1..20: mol_type = other RNA
tgaagatcctcaagaaggaa

SEQ ID NO: 312 - RNA, 20 nt, synthetic construct
  source 1..20: mol_type = other RNA
catgaagatcctcaagaagg

SEQ ID NO: 313 - RNA, 20 nt, synthetic construct
  source 1..20: mol_type = other RNA
ccatgaagatcctcaagaag

SEQ ID NO: 314 - RNA, 20 nt, synthetic construct
  source 1..20: mol_type = other RNA
actgactttggcctctgcaa

SEQ ID NO: 315 - RNA, 20 nt, synthetic construct
  source 1..20: mol_type = other RNA
ctgactttggcctctgcaaa

SEQ ID NO: 316 - RNA, 20 nt, synthetic construct
  source 1..20: mol_type = other RNA
cactgactttggcctctgca

SEQ ID NO: 317 - RNA, 20 nt, synthetic construct
  source 1..20: mol_type = other RNA
tcactgactttggcctctgc

SEQ ID NO: 318 - RNA, 20 nt, synthetic construct
  source 1..20: mol_type = other RNA
atcactgactttggcctctg

SEQ ID NO: 319 - RNA, 20 nt, synthetic construct
  source 1..20: mol_type = other RNA
gcgacatcaaggttagtggc

SEQ ID NO: 320 - RNA, 20 nt, synthetic construct
  source 1..20: mol_type = other RNA
accgcgacatcaaggttagt

SEQ ID NO: 321 - RNA, 20 nt, synthetic construct
  source 1..20: mol_type = other RNA
taccgcgacatcaaggttag

SEQ ID NO: 322 - RNA, 20 nt, synthetic construct
  source 1..20: mol_type = other RNA
cgcgacatcaaggttagtgg

SEQ ID NO: 323 - RNA, 20 nt, synthetic construct
  source 1..20: mol_type = other RNA
ccgcgacatcaaggttagtg

SEQ ID NO: 324 - RNA, 20 nt, synthetic construct
  source 1..20: mol_type = other RNA
gaaaacctcatgctggacaa

SEQ ID NO: 325 - RNA, 20 nt, synthetic construct
  source 1..20: mol_type = other RNA
aaaacctcatgctggacaaa

SEQ ID NO: 326 - RNA, 20 nt, synthetic construct
  source 1..20: mol_type = other RNA
ggaaaacctcatgctggaca

SEQ ID NO: 327 - RNA, 20 nt, synthetic construct
  source 1..20: mol_type = other RNA
tggaaaacctcatgctggac

SEQ ID NO: 328 - RNA, 20 nt, synthetic construct
  source 1..20: mol_type = other RNA
ctggaaaacctcatgctgga

SEQ ID NO: 329 - RNA, 20 nt, synthetic construct
  source 1..20: mol_type = other RNA
gctggaaaacctcatgctgg

SEQ ID NO: 330 - RNA, 20 nt, synthetic construct
  source 1..20: mol_type = other RNA
atgaagatcctgcggaagga

SEQ ID NO: 331 - RNA, 20 nt, synthetic construct
  source 1..20: mol_type = other RNA
gccatgaagatcctgcggaa

SEQ ID NO: 332 - RNA, 20 nt, synthetic construct
  source 1..20: mol_type = other RNA
cgccatgaagatcctgcgga

SEQ ID NO: 333 - RNA, 20 nt, synthetic construct
  source 1..20: mol_type = other RNA
tgaagatcctgcggaaggaa

SEQ ID NO: 334 - RNA, 20 nt, synthetic construct
  source 1..20: mol_type = other RNA
catgaagatcctgcggaagg

SEQ ID NO: 335 - RNA, 20 nt, synthetic construct
  source 1..20: mol_type = other RNA
ccatgaagatcctgcggaag

SEQ ID NO: 336 - RNA, 20 nt, synthetic construct
  source 1..20: mol_type = other RNA
accgtgatctcaaggtaaaa

SEQ ID NO: 337 - RNA, 20 nt, synthetic construct
  source 1..20: mol_type = other RNA
taccgtgatctcaaggtaaa

SEQ ID NO: 338 - RNA, 20 nt, synthetic construct
  source 1..20: mol_type = other RNA
gagaatctaatgctggacaa

SEQ ID NO: 339 - RNA, 20 nt, synthetic construct
  source 1..20: mol_type = other RNA
agaatctaatgctggacaaa

SEQ ID NO: 340 - RNA, 20 nt, synthetic construct
  source 1..20: mol_type = other RNA
ggagaatctaatgctggaca

SEQ ID NO: 341 - RNA, 20 nt, synthetic construct
  source 1..20: mol_type = other RNA
tggagaatctaatgctggac

SEQ ID NO: 342 - RNA, 20 nt, synthetic construct
  source 1..20: mol_type = other RNA
ttggagaatctaatgctgga

SEQ ID NO: 343 - RNA, 20 nt, synthetic construct
  source 1..20: mol_type = other RNA
gttggagaatctaatgctgg

SEQ ID NO: 344 - RNA, 20 nt, synthetic construct
  source 1..20: mol_type = other RNA
atgaagattctgaagaaaga

SEQ ID NO: 345 - RNA, 20 nt, synthetic construct
  source 1..20: mol_type = other RNA
gctatgaagattctgaagaa

SEQ ID NO: 346 - RNA, 20 nt, synthetic construct
  source 1..20: mol_type = other RNA
tgaagattctgaagaaagaa

SEQ ID NO: 347 - RNA, 20 nt, synthetic construct
  source 1..20: mol_type = other RNA
tatgaagattctgaagaaag

SEQ ID NO: 348 - RNA, 20 nt, synthetic construct
  source 1..20: mol_type = other RNA
ctatgaagattctgaagaaa

SEQ ID NO: 349 - RNA, 20 nt, synthetic construct
  source 1..20: mol_type = other RNA
tgctatgaagattctgaaga

SEQ ID NO: 350 - RNA, 20 nt, synthetic construct
  source 1..20: mol_type = other RNA
ggagacttcgggatggcccg

SEQ ID NO: 351 - RNA, 20 nt, synthetic construct
  source 1..20: mol_type = other RNA
ttggagacttcgggatggcc

SEQ ID NO: 352 - RNA, 20 nt, synthetic construct
  source 1..20: mol_type = other RNA
gagacttcgggatggcccga

SEQ ID NO: 353 - RNA, 20 nt, synthetic construct
  source 1..20: mol_type = other RNA
tggagacttcgggatggccc

SEQ ID NO: 354 - RNA, 20 nt, synthetic construct
  source 1..20: mol_type = other RNA
attggagacttcgggatggc

SEQ ID NO: 355 - RNA, 20 nt, synthetic construct
  source 1..20: mol_type = other RNA
gagacattgctgccagaaac

SEQ ID NO: 356 - RNA, 20 nt, synthetic construct
  source 1..20: mol_type = other RNA
agagacattgctgccagaaa

SEQ ID NO: 357 - RNA, 20 nt, synthetic construct
  source 1..20: mol_type = other RNA
cagagacattgctgccagaa

SEQ ID NO: 358 - RNA, 20 nt, synthetic construct
  source 1..20: mol_type = other RNA
ccagagacattgctgccaga

SEQ ID NO: 359 - RNA, 20 nt, synthetic construct
  source 1..20: mol_type = other RNA
cccagagacattgctgccag

SEQ ID NO: 360 - RNA, 20 nt, synthetic construct
  source 1..20: mol_type = other RNA
ccagaaactgcctcttgacc

SEQ ID NO: 361 - RNA, 20 nt, synthetic construct
  source 1..20: mol_type = other RNA
gaaactgcctcttgacctgt

SEQ ID NO: 362 - RNA, 20 nt, synthetic construct
  source 1..20: mol_type = other RNA
agaaactgcctcttgacctg

SEQ ID NO: 363 - RNA, 20 nt, synthetic construct
  source 1..20: mol_type = other RNA
cagaaactgcctcttgacct

SEQ ID NO: 364 - RNA, 20 nt, synthetic construct
  source 1..20: mol_type = other RNA
gccagaaactgcctcttgac

SEQ ID NO: 365 - RNA, 20 nt, synthetic construct
  source 1..20: mol_type = other RNA
tgccagaaactgcctcttga

SEQ ID NO: 366 - RNA, 20 nt, synthetic construct
  source 1..20: mol_type = other RNA
tgaaggtaagaagtggctca

SEQ ID NO: 367 - RNA, 20 nt, synthetic construct
  source 1..20: mol_type = other RNA
gtgaaggtaagaagtggctc

SEQ ID NO: 368 - RNA, 20 nt, synthetic construct
  source 1..20: mol_type = other RNA
tgtgaaggtaagaagtggct

SEQ ID NO: 369 - RNA, 20 nt, synthetic construct
  source 1..20: mol_type = other RNA
ctgtgaaggtaagaagtggc

SEQ ID NO: 370 - RNA, 20 nt, synthetic construct
  source 1..20: mol_type = other RNA
gctgtgaaggtaagaagtgg

SEQ ID NO: 371 - RNA, 20 nt, synthetic construct
  source 1..20: mol_type = other RNA
ggctgtgaaggtaagaagtg

SEQ ID NO: 372 - RNA, 20 nt, synthetic construct
  source 1..20: mol_type = other RNA
acagatccccagattcactc

SEQ ID NO: 373 - RNA, 20 nt, synthetic construct
  source 1..20: mol_type = other RNA
ctcacagatccccagattca

SEQ ID NO: 374 - RNA, 20 nt, synthetic construct
  source 1..20: mol_type = other RNA
tcacagatccccagattcac

SEQ ID NO: 375 - RNA, 20 nt, synthetic construct
  source 1..20: mol_type = other RNA
cacagatccccagattcact

SEQ ID NO: 376 - RNA, 20 nt, synthetic construct
  source 1..20: mol_type = other RNA
cagatccccagattcactcc

SEQ ID NO: 377 - RNA, 20 nt, synthetic construct
  source 1..20: mol_type = other RNA
tggtcgatttacaaggtatg

SEQ ID NO: 378 - RNA, 20 nt, synthetic construct
  source 1..20: mol_type = other RNA
gtggtcgatttacaaggtat

SEQ ID NO: 379 - RNA, 20 nt, synthetic construct
  source 1..20: mol_type = other RNA
ggtcgatttacaaggtatgt

SEQ ID NO: 380 - RNA, 20 nt, synthetic construct
  source 1..20: mol_type = other RNA
gtcgatttacaaggtatgtg

SEQ ID NO: 381 - RNA, 20 nt, synthetic construct
  source 1..20: mol_type = other RNA
tcgatttacaaggtatgtga

SEQ ID NO: 382 - RNA, 20 nt, synthetic construct
  source 1..20: mol_type = other RNA
atttacaaggtatgtgaaac

SEQ ID NO: 383 - RNA, 20 nt, synthetic construct
  source 1..20: mol_type = other RNA
tttacaaggtatgtgaaact

SEQ ID NO: 384 - RNA, 20 nt, synthetic construct
  source 1..20: mol_type = other RNA
ttacaaggtatgtgaaactg

SEQ ID NO: 385 - RNA, 20 nt, synthetic construct
  source 1..20: mol_type = other RNA
gatttacaaggtatgtgaaa

SEQ ID NO: 386 - RNA, 20 nt, synthetic construct
  source 1..20: mol_type = other RNA
tacaaggtatgtgaaactgg

SEQ ID NO: 387 - RNA, 20 nt, synthetic construct
  source 1..20: mol_type = other RNA
acaaggtatgtgaaactggg

SEQ ID NO: 388 - RNA, 20 nt, synthetic construct
  source 1..20: mol_type = other RNA
tgttgggaaagactataagg

SEQ ID NO: 389 - RNA, 20 nt, synthetic construct
  source 1..20: mol_type = other RNA
tgggaaagactataaggagc

SEQ ID NO: 390 - RNA, 20 nt, synthetic construct
  source 1..20: mol_type = other RNA
gaaagactataaggagcaga

SEQ ID NO: 391 - RNA, 20 nt, synthetic construct
  source 1..20: mol_type = other RNA
gttgggaaagactataagga

SEQ ID NO: 392 - RNA, 20 nt, synthetic construct
  source 1..20: mol_type = other RNA
ttgggaaagactataaggag

SEQ ID NO: 393 - RNA, 20 nt, synthetic construct
  source 1..20: mol_type = other RNA
gggaaagactataaggagca

SEQ ID NO: 394 - RNA, 20 nt, synthetic construct
  source 1..20: mol_type = other RNA
ggaaagactataaggagcag

SEQ ID NO: 395 - RNA, 20 nt, synthetic construct
  source 1..20: mol_type = other RNA
aactgacgttggcatagcaa

SEQ ID NO: 396 - RNA, 20 nt, synthetic construct
  source 1..20: mol_type = other RNA
ctgacgttggcatagcaacg

SEQ ID NO: 397 - RNA, 20 nt, synthetic construct
  source 1..20: mol_type = other RNA
actgacgttggcatagcaac

SEQ ID NO: 398 - RNA, 20 nt, synthetic construct
  source 1..20: mol_type = other RNA
taactgacgttggcatagca

SEQ ID NO: 399 - RNA, 20 nt, synthetic construct
  source 1..20: mol_type = other RNA
ctaactgacgttggcatagc

SEQ ID NO: 400 - RNA, 20 nt, synthetic construct
  source 1..20: mol_type = other RNA
cggacatgcaaggtgaggaa

SEQ ID NO: 401 - RNA, 20 nt, synthetic construct
  source 1..20: mol_type = other RNA
gtgacggacatgcaaggtga

SEQ ID NO: 402 - RNA, 20 nt, synthetic construct
  source 1..20: mol_type = other RNA
acggacatgcaaggtgagga

SEQ ID NO: 403 - RNA, 20 nt, synthetic construct
  source 1..20: mol_type = other RNA
gacggacatgcaaggtgagg

SEQ ID NO: 404 - RNA, 20 nt, synthetic construct
  source 1..20: mol_type = other RNA
tgacggacatgcaaggtgag

SEQ ID NO: 405 - RNA, 20 nt, synthetic construct
  source 1..20: mol_type = other RNA
acatgcaaggtgaggaaagc

SEQ ID NO: 406 - RNA, 20 nt, synthetic construct
  source 1..20: mol_type = other RNA
gcaaggtgaggaaagcagct

SEQ ID NO: 407 - RNA, 20 nt, synthetic construct
  source 1..20: mol_type = other RNA
tgcaaggtgaggaaagcagc

SEQ ID NO: 408 - RNA, 20 nt, synthetic construct
  source 1..20: mol_type = other RNA
atgcaaggtgaggaaagcag

SEQ ID NO: 409 - RNA, 20 nt, synthetic construct
  source 1..20: mol_type = other RNA
catgcaaggtgaggaaagca

SEQ ID NO: 410 - RNA, 20 nt, synthetic construct
  source 1..20: mol_type = other RNA
gacatgcaaggtgaggaaag

SEQ ID NO: 411 - RNA, 20 nt, synthetic construct
  source 1..20: mol_type = other RNA
cttaaggtgcacaatgccat

SEQ ID NO: 412 - RNA, 20 nt, synthetic construct
  source 1..20: mol_type = other RNA
ttaaggtgcacaatgccatt

SEQ ID NO: 413 - RNA, 20 nt, synthetic construct
  source 1..20: mol_type = other RNA
gcttaaggtgcacaatgcca

SEQ ID NO: 414 - RNA, 20 nt, synthetic construct
  source 1..20: mol_type = other RNA
tgcttaaggtgcacaatgcc

SEQ ID NO: 415 - RNA, 20 nt, synthetic construct
  source 1..20: mol_type = other RNA
gtgcttaaggtgcacaatgc

SEQ ID NO: 416 - RNA, 20 nt, synthetic construct
  source 1..20: mol_type = other RNA
tgtgcttaaggtgcacaatg

SEQ ID NO: 417 - RNA, 20 nt, synthetic construct
  source 1..20: mol_type = other RNA
atgactgatgtgcagattgc

SEQ ID NO: 418 - RNA, 20 nt, synthetic construct
  source 1..20: mol_type = other RNA
tgactgatgtgcagattgct

SEQ ID NO: 419 - RNA, 20 nt, synthetic construct
  source 1..20: mol_type = other RNA
gactgatgtgcagattgcta

SEQ ID NO: 420 - RNA, 20 nt, synthetic construct
  source 1..20: mol_type = other RNA
actgatgtgcagattgctac

SEQ ID NO: 421 - RNA, 20 nt, synthetic construct
  source 1..20: mol_type = other RNA
ctgatgtgcagattgctacc

SEQ ID NO: 422 - RNA, 20 nt, synthetic construct
  source 1..20: mol_type = other RNA
tcacagacttggcaggtacg

SEQ ID NO: 423 - RNA, 20 nt, synthetic construct
  source 1..20: mol_type = other RNA
cacagacttggcaggtacga

SEQ ID NO: 424 - RNA, 20 nt, synthetic construct
  source 1..20: mol_type = other RNA
acagacttggcaggtacgag

SEQ ID NO: 425 - RNA, 20 nt, synthetic construct
  source 1..20: mol_type = other RNA
gtcacagacttggcaggtac

SEQ ID NO: 426 - RNA, 20 nt, synthetic construct
  source 1..20: mol_type = other RNA
cagacttggcaggtacgagg

SEQ ID NO: 427 - RNA, 20 nt, synthetic construct
  source 1..20: mol_type = other RNA
catcatcaaggtgtccagcc

SEQ ID NO: 428 - RNA, 20 nt, synthetic construct
  source 1..20: mol_type = other RNA
atcaaggtgtccagcctgct

SEQ ID NO: 429 - RNA, 20 nt, synthetic construct
  source 1..20: mol_type = other RNA
atcatcaaggtgtccagcct

SEQ ID NO: 430 - RNA, 20 nt, synthetic construct
  source 1..20: mol_type = other RNA
tcatcaaggtgtccagcctg

SEQ ID NO: 431 - RNA, 20 nt, synthetic construct
  source 1..20: mol_type = other RNA
catcaaggtgtccagcctgc

SEQ ID NO: 432 - RNA, 20 nt, synthetic construct
  source 1..20: mol_type = other RNA
tcaaggtgtccagcctgctt

SEQ ID NO: 433 - RNA, 20 nt, synthetic construct
  source 1..20: mol_type = other RNA
tggagacctgggccttgcct

SEQ ID NO: 434 - RNA, 20 nt, synthetic construct
  source 1..20: mol_type = other RNA
ggagacctgggccttgcctt

SEQ ID NO: 435 - RNA, 20 nt, synthetic construct
  source 1..20: mol_type = other RNA
attggagacctgggccttgc

SEQ ID NO: 436 - RNA, 20 nt, synthetic construct
  source 1..20: mol_type = other RNA
ttggagacctgggccttgcc

SEQ ID NO: 437 - RNA, 20 nt, synthetic construct
  source 1..20: mol_type = other RNA
gagacctgggccttgccttg

SEQ ID NO: 438 - RNA, 20 nt, synthetic construct
  source 1..20: mol_type = other RNA
cgagatctgagcagccagaa

SEQ ID NO: 439 - RNA, 20 nt, synthetic construct
  source 1..20: mol_type = other RNA
caccgagatctgagcagcca

SEQ ID NO: 440 - RNA, 20 nt, synthetic construct
  source 1..20: mol_type = other RNA
accgagatctgagcagccag

SEQ ID NO: 441 - RNA, 20 nt, synthetic construct
  source 1..20: mol_type = other RNA
ccgagatctgagcagccaga

SEQ ID NO: 442 - RNA, 20 nt, synthetic construct
  source 1..20: mol_type = other RNA
gagatctgagcagccagaat

SEQ ID NO: 443 - RNA, 20 nt, synthetic construct
  source 1..20: mol_type = other RNA
cagccagaatgtgctcattc

SEQ ID NO: 444 - RNA, 20 nt, synthetic construct
  source 1..20: mol_type = other RNA
agccagaatgtgctcattcg

SEQ ID NO: 445 - RNA, 20 nt, synthetic construct
  source 1..20: mol_type = other RNA
cagaatgtgctcattcggga

SEQ ID NO: 446 - RNA, 20 nt, synthetic construct
  source 1..20: mol_type = other RNA
gccagaatgtgctcattcgg

SEQ ID NO: 447 - RNA, 20 nt, synthetic construct
  source 1..20: mol_type = other RNA
ccagaatgtgctcattcggg

SEQ ID NO: 448 - RNA, 20 nt, synthetic construct
  source 1..20: mol_type = other RNA
agaatgtgctcattcgggaa

SEQ ID NO: 449 - RNA, 20 nt, synthetic construct
  source 1..20: mol_type = other RNA
tgccatcaaggccttcccac

SEQ ID NO: 450 - RNA, 20 nt, synthetic construct
  source 1..20: mol_type = other RNA
ccatcaaggccttcccaccg

SEQ ID NO: 451 - RNA, 20 nt, synthetic construct
  source 1..20: mol_type = other RNA
catcaaggccttcccaccga

SEQ ID NO: 452 - RNA, 20 nt, synthetic construct
  source 1..20: mol_type = other RNA
gccatcaaggccttcccacc

SEQ ID NO: 453 - RNA, 20 nt, synthetic construct
  source 1..20: mol_type = other RNA
atcaaggccttcccaccgag

SEQ ID NO: 454 - RNA, 20 nt, synthetic construct
  source 1..20: mol_type = other RNA
tcaaggccttcccaccgagg

SEQ ID NO: 455 - RNA, 20 nt, synthetic construct
  source 1..20: mol_type = other RNA
ttcagacttcggcctgtcca

SEQ ID NO: 456 - RNA, 20 nt, synthetic construct
  source 1..20: mol_type = other RNA
cagacttcggcctgtccaag

SEQ ID NO: 457 - RNA, 20 nt, synthetic construct
  source 1..20: mol_type = other RNA
atttcagacttcggcctgtc

SEQ ID NO: 458 - RNA, 20 nt, synthetic construct
  source 1..20: mol_type = other RNA
tttcagacttcggcctgtcc

SEQ ID NO: 459 - RNA, 20 nt, synthetic construct
  source 1..20: mol_type = other RNA
tcagacttcggcctgtccaa

SEQ ID NO: 460 - RNA, 20 nt, synthetic construct
  source 1..20: mol_type = other RNA
cacctggacctcaagccggg

SEQ ID NO: 461 - RNA, 20 nt, synthetic construct
  source 1..20: mol_type = other RNA
acctggacctcaagccgggc

SEQ ID NO: 462 - RNA, 20 nt, synthetic construct
  source 1..20: mol_type = other RNA
cctggacctcaagccgggca

SEQ ID NO: 463 - RNA, 20 nt, synthetic construct
  source 1..20: mol_type = other RNA
ctggacctcaagccgggcaa

SEQ ID NO: 464 - RNA, 20 nt, synthetic construct
  source 1..20: mol_type = other RNA
tggacctcaagccgggcaac

SEQ ID NO: 465 - RNA, 20 nt, synthetic construct
  source 1..20: mol_type = other RNA
cgggcaacatactcctggac

SEQ ID NO: 466 - RNA, 20 nt, synthetic construct
  source 1..20: mol_type = other RNA
gccgggcaacatactcctgg

SEQ ID NO: 467 - RNA, 20 nt, synthetic construct
  source 1..20: mol_type = other RNA
ccgggcaacatactcctgga

SEQ ID NO: 468 - RNA, 20 nt, synthetic construct
  source 1..20: mol_type = other RNA
gggcaacatactcctggaca

SEQ ID NO: 469 - RNA, 20 nt, synthetic construct
  source 1..20: mol_type = other RNA
ggcaacatactcctggacag

SEQ ID NO: 470 - RNA, 20 nt, synthetic construct
  source 1..20: mol_type = other RNA
gcaacatactcctggacagc

SEQ ID NO: 471 - RNA, 20 nt, synthetic construct
  source 1..20: mol_type = other RNA
ggtgactttggcttggccac

SEQ ID NO: 472 - RNA, 20 nt, synthetic construct
  source 1..20: mol_type = other RNA
atcggtgactttggcttggc

SEQ ID NO: 473 - RNA, 20 nt, synthetic construct
  source 1..20: mol_type = other RNA
tcggtgactttggcttggcc

SEQ ID NO: 474 - RNA, 20 nt, synthetic construct
  source 1..20: mol_type = other RNA
cggtgactttggcttggcca

SEQ ID NO: 475 - RNA, 20 nt, synthetic construct
  source 1..20: mol_type = other RNA
gtgactttggcttggccaca

SEQ ID NO: 476 - RNA, 20 nt, synthetic construct
  source 1..20: mol_type = other RNA
accgagatctcaagtctaac

SEQ ID NO: 477 - RNA, 20 nt, synthetic construct
  source 1..20: mol_type = other RNA
caccgagatctcaagtctaa

SEQ ID NO: 478 - RNA, 20 nt, synthetic construct
  source 1..20: mol_type = other RNA
ccgagatctcaagtctaaca

SEQ ID NO: 479 - RNA, 20 nt, synthetic construct
  source 1..20: mol_type = other RNA
cgagatctcaagtctaacag

SEQ ID NO: 480 - RNA, 20 nt, synthetic construct
  source 1..20: mol_type = other RNA
gagatctcaagtctaacagt

SEQ ID NO: 481 - RNA, 20 nt, synthetic construct
  source 1..20: mol_type = other RNA
taacagtatctatctgtccc

SEQ ID NO: 482 - RNA, 20 nt, synthetic construct
  source 1..20: mol_type = other RNA
aacagtatctatctgtccct

SEQ ID NO: 483 - RNA, 20 nt, synthetic construct
  source 1..20: mol_type = other RNA
gtctaacagtatctatctgt

SEQ ID NO: 484 - RNA, 20 nt, synthetic construct
  source 1..20: mol_type = other RNA
tctaacagtatctatctgtc

SEQ ID NO: 485 - RNA, 20 nt, synthetic construct
  source 1..20: mol_type = other RNA
ctaacagtatctatctgtcc

SEQ ID NO: 486 - RNA, 20 nt, synthetic construct
  source 1..20: mol_type = other RNA
ctggcggacatcttcctaca

SEQ ID NO: 487 - RNA, 20 nt, synthetic construct
  source 1..20: mol_type = other RNA
ggcggacatcttcctacatg

SEQ ID NO: 488 - RNA, 20 nt, synthetic construct
  source 1..20: mol_type = other RNA
gcggacatcttcctacatga

SEQ ID NO: 489 - RNA, 20 nt, synthetic construct
  source 1..20: mol_type = other RNA
cggacatcttcctacatgag

SEQ ID NO: 490 - RNA, 20 nt, synthetic construct
  source 1..20: mol_type = other RNA
tggcggacatcttcctacat

SEQ ID NO: 491 - RNA, 20 nt, synthetic construct
  source 1..20: mol_type = other RNA
ggccgtgaaggtgctcaagg

SEQ ID NO: 492 - RNA, 20 nt, synthetic construct
  source 1..20: mol_type = other RNA
gccgtgaaggtgctcaaggt

SEQ ID NO: 493 - RNA, 20 nt, synthetic construct
  source 1..20: mol_type = other RNA
ccgtgaaggtgctcaaggtg

SEQ ID NO: 494 - RNA, 20 nt, synthetic construct
  source 1..20: mol_type = other RNA
cgtgaaggtgctcaaggtgt

SEQ ID NO: 495 - RNA, 20 nt, synthetic construct
  source 1..20: mol_type = other RNA
gtgaaggtgctcaaggtgtc

SEQ ID NO: 496 - RNA, 20 nt, synthetic construct
  source 1..20: mol_type = other RNA
tgaaggtgctcaaggtgtcc

SEQ ID NO: 497 - RNA, 20 nt, synthetic construct
  source 1..20: mol_type = other RNA
catatagatctaggtaagta

SEQ ID NO: 498 - RNA, 20 nt, synthetic construct
  source 1..20: mol_type = other RNA
atatagatctaggtaagtaa

SEQ ID NO: 499 - RNA, 20 nt, synthetic construct
  source 1..20: mol_type = other RNA
tatagatctaggtaagtaat

SEQ ID NO: 500 - RNA, 20 nt, synthetic construct
  source 1..20: mol_type = other RNA
atagatctaggtaagtaata

SEQ ID NO: 501 - RNA, 20 nt, synthetic construct
  source 1..20: mol_type = other RNA
tagatctaggtaagtaataa

SEQ ID NO: 502 - RNA, 20 nt, synthetic construct
  source 1..20: mol_type = other RNA
cttggtgatagacatgtaca

SEQ ID NO: 503 - RNA, 20 nt, synthetic construct
  source 1..20: mol_type = other RNA
ttggtgatagacatgtacag

SEQ ID NO: 504 - RNA, 20 nt, synthetic construct
  source 1..20: mol_type = other RNA
tggtgatagacatgtacaga

SEQ ID NO: 505 - RNA, 20 nt, synthetic construct
  source 1..20: mol_type = other RNA
ggtgatagacatgtacagaa

SEQ ID NO: 506 - RNA, 20 nt, synthetic construct
  source 1..20: mol_type = other RNA
gtgatagacatgtacagaat

SEQ ID NO: 507 - RNA, 20 nt, synthetic construct
  source 1..20: mol_type = other RNA
gtacagaatatcttgataaa

SEQ ID NO: 508 - RNA, 20 nt, synthetic construct
  source 1..20: mol_type = other RNA
acagaatatcttgataaatg

SEQ ID NO: 509 - RNA, 20 nt, synthetic construct
  source 1..20: mol_type = other RNA
tgtacagaatatcttgataa

SEQ ID NO: 510 - RNA, 20 nt, synthetic construct
  source 1..20: mol_type = other RNA
tacagaatatcttgataaat

SEQ ID NO: 511 - RNA, 20 nt, synthetic construct
  source 1..20: mol_type = other RNA
cagaatatcttgataaatga

SEQ ID NO: 512 - RNA, 20 nt, synthetic construct
  source 1..20: mol_type = other RNA
agaatatcttgataaatgag

SEQ ID NO: 513 - RNA, 20 nt, synthetic construct
  source 1..20: mol_type = other RNA
gcttgttaaggtgagccttc

SEQ ID NO: 514 - RNA, 20 nt, synthetic construct
  source 1..20: mol_type = other RNA
cttgttaaggtgagccttcc

SEQ ID NO: 515 - RNA, 20 nt, synthetic construct
  source 1..20: mol_type = other RNA
ttgttaaggtgagccttccc

SEQ ID NO: 516 - RNA, 20 nt, synthetic construct
  source 1..20: mol_type = other RNA
tgttaaggtgagccttccct

SEQ ID NO: 517 - RNA, 20 nt, synthetic construct
  source 1..20: mol_type = other RNA
gttaaggtgagccttccctt

SEQ ID NO: 518 - RNA, 20 nt, synthetic construct
  source 1..20: mol_type = other RNA
ttaaggtgagccttcccttc

SEQ ID NO: 519 - RNA, 20 nt, synthetic construct
  source 1..20: mol_type = other RNA
tgtagatttcaattgtcttt

SEQ ID NO: 520 - RNA, 20 nt, synthetic construct
  source 1..20: mol_type = other RNA
atgtagatttcaattgtctt

SEQ ID NO: 521 - RNA, 20 nt, synthetic construct
  source 1..20: mol_type = other RNA
catgtagatttcaattgtct

SEQ ID NO: 522 - RNA, 20 nt, synthetic construct
  source 1..20: mol_type = other RNA
gagaccgtcatggtgaaaat

SEQ ID NO: 523 - RNA, 20 nt, synthetic construct
  source 1..20: mol_type = other RNA
ggagaccgtcatggtgaaaa

SEQ ID NO: 524 - RNA, 20 nt, synthetic construct
  source 1..20: mol_type = other RNA
tggagaccgtcatggtgaaa

SEQ ID NO: 525 - RNA, 20 nt, synthetic construct
  source 1..20: mol_type = other RNA
ttggagaccgtcatggtgaa

SEQ ID NO: 526 - RNA, 20 nt, synthetic construct
  source 1..20: mol_type = other RNA
cttggagaccgtcatggtga

SEQ ID NO: 527 - RNA, 20 nt, synthetic construct
  source 1..20: mol_type = other RNA
aaaatattctctttgattct

SEQ ID NO: 528 - RNA, 20 nt, synthetic construct
  source 1..20: mol_type = other RNA
gaaaatattctctttgattc

SEQ ID NO: 529 - RNA, 20 nt, synthetic construct
  source 1..20: mol_type = other RNA
tgaaaatattctctttgatt

SEQ ID NO: 530 - RNA, 20 nt, synthetic construct
  source 1..20: mol_type = other RNA
gtgaaaatattctctttgat

SEQ ID NO: 531 - RNA, 20 nt, synthetic construct
  source 1..20: mol_type = other RNA
ggtgaaaatattctctttga

SEQ ID NO: 532 - RNA, 20 nt, synthetic construct
  source 1..20: mol_type = other RNA
tggtgaaaatattctctttg

SEQ ID NO: 533 - RNA, 20 nt, synthetic construct
  source 1..20: mol_type = other RNA
gtaagccaaaagatgacctg

SEQ ID NO: 534 - RNA, 20 nt, synthetic construct
  source 1..20: mol_type = other RNA
gtgtaagccaaaagatgacc

SEQ ID NO: 535 - RNA, 20 nt, synthetic construct
  source 1..20: mol_type = other RNA
tgtaagccaaaagatgacct

SEQ ID NO: 536 - RNA, 20 nt, synthetic construct
  source 1..20: mol_type = other RNA
tgtgtaagccaaaagatgac

SEQ ID NO: 537 - RNA, 20 nt, synthetic construct
  source 1..20: mol_type = other RNA
atgtgtaagccaaaagatga

SEQ ID NO: 538 - RNA, 20 nt, synthetic construct
  source 1..20: mol_type = other RNA
gatgtgtaagccaaaagatg

SEQ ID NO: 539 - RNA, 20 nt, synthetic construct
  source 1..20: mol_type = other RNA
gagacattaagccagagaac

SEQ ID NO: 540 - RNA, 20 nt, synthetic construct
  source 1..20: mol_type = other RNA
agagacattaagccagagaa

SEQ ID NO: 541 - RNA, 20 nt, synthetic construct
  source 1..20: mol_type = other RNA
tagagacattaagccagaga

SEQ ID NO: 542 - RNA, 20 nt, synthetic construct
  source 1..20: mol_type = other RNA
atagagacattaagccagag

SEQ ID NO: 543 - RNA, 20 nt, synthetic construct
  source 1..20: mol_type = other RNA
catagagacattaagccaga

SEQ ID NO: 544 - RNA, 20 nt, synthetic construct
  source 1..20: mol_type = other RNA
gagaacttacttcttggatc

SEQ ID NO: 545 - RNA, 20 nt, synthetic construct
  source 1..20: mol_type = other RNA
agaacttacttcttggatca

SEQ ID NO: 546 - RNA, 20 nt, synthetic construct
  source 1..20: mol_type = other RNA
agagaacttacttcttggat

SEQ ID NO: 547 - RNA, 20 nt, synthetic construct
  source 1..20: mol_type = other RNA
cagagaacttacttcttgga

SEQ ID NO: 548 - RNA, 20 nt, synthetic construct
  source 1..20: mol_type = other RNA
ccagagaacttacttcttgg

SEQ ID NO: 549 - RNA, 20 nt, synthetic construct
  source 1..20: mol_type = other RNA
gccagagaacttacttcttg

SEQ ID NO: 550 - RNA, 20 nt, synthetic construct
  source 1..20: mol_type = other RNA
taaagtgttatttaaagctc

SEQ ID NO: 551 - RNA, 20 nt, synthetic construct
  source 1..20: mol_type = other RNA
gctcttaaagtgttatttaa

SEQ ID NO: 552 - RNA, 20 nt, synthetic construct
  source 1..20: mol_type = other RNA
ttaaagtgttatttaaagct

SEQ ID NO: 553 - RNA, 20 nt, synthetic construct
  source 1..20: mol_type = other RNA
cttaaagtgttatttaaagc

SEQ ID NO: 554 - RNA, 20 nt, synthetic construct
  source 1..20: mol_type = other RNA
tcttaaagtgttatttaaag

SEQ ID NO: 555 - RNA, 20 nt, synthetic construct
  source 1..20: mol_type = other RNA
ctcttaaagtgttatttaaa

SEQ ID NO: 556 - RNA, 20 nt, synthetic construct
  source 1..20: mol_type = other RNA
ggctcttaaagtgttattta

SEQ ID NO: 557 - RNA, 20 nt, synthetic construct
  source 1..20: mol_type = other RNA
tgctgacttcggctggtctg

SEQ ID NO: 558 - RNA, 20 nt, synthetic construct
  source 1..20: mol_type = other RNA
attgctgacttcggctggtc

SEQ ID NO: 559 - RNA, 20 nt, synthetic construct
  source 1..20: mol_type = other RNA
ctgacttcggctggtctgtg

SEQ ID NO: 560 - RNA, 20 nt, synthetic construct
  source 1..20: mol_type = other RNA
gctgacttcggctggtctgt

SEQ ID NO: 561 - RNA, 20 nt, synthetic construct
  source 1..20: mol_type = other RNA
ttgctgacttcggctggtct

SEQ ID NO: 562 - RNA, 20 nt, synthetic construct
  source 1..20: mol_type = other RNA
gagacataaagccagaaaat

SEQ ID NO: 563 - RNA, 20 nt, synthetic construct
  source 1..20: mol_type = other RNA
agagacataaagccagaaaa

SEQ ID NO: 564 - RNA, 20 nt, synthetic construct
  source 1..20: mol_type = other RNA
cagagacataaagccagaaa

SEQ ID NO: 565 - RNA, 20 nt, synthetic construct
  source 1..20: mol_type = other RNA
acagagacataaagccagaa

SEQ ID NO: 566 - RNA, 20 nt, synthetic construct
  source 1..20: mol_type = other RNA
cacagagacataaagccaga

SEQ ID NO: 567 - RNA, 20 nt, synthetic construct
  source 1..20: mol_type = other RNA
gccagaaaatctgctcttag

SEQ ID NO: 568 - RNA, 20 nt, synthetic construct
  source 1..20: mol_type = other RNA
aaaatctgctcttagggctc

SEQ ID NO: 569 - RNA, 20 nt, synthetic construct
  source 1..20: mol_type = other RNA
gaaaatctgctcttagggct

SEQ ID NO: 570 - RNA, 20 nt, synthetic construct
  source 1..20: mol_type = other RNA
agaaaatctgctcttagggc

SEQ ID NO: 571 - RNA, 20 nt, synthetic construct
  source 1..20: mol_type = other RNA
cagaaaatctgctcttaggg

SEQ ID NO: 572 - RNA, 20 nt, synthetic construct
  source 1..20: mol_type = other RNA
ccagaaaatctgctcttagg

SEQ ID NO: 573 - RNA, 20 nt, synthetic construct
  source 1..20: mol_type = other RNA
ggcgctcaaggtcctcttca

SEQ ID NO: 574 - RNA, 20 nt, synthetic construct
  source 1..20: mol_type = other RNA
tcaaggtcctcttcaagtcc

SEQ ID NO: 575 - RNA, 20 nt, synthetic construct
  source 1..20: mol_type = other RNA
ctcaaggtcctcttcaagtc

SEQ ID NO: 576 - RNA, 20 nt, synthetic construct
  source 1..20: mol_type = other RNA
gctcaaggtcctcttcaagt

SEQ ID NO: 577 - RNA, 20 nt, synthetic construct
  source 1..20: mol_type = other RNA
cgctcaaggtcctcttcaag

SEQ ID NO: 578 - RNA, 20 nt, synthetic construct
  source 1..20: mol_type = other RNA
gcgctcaaggtcctcttcaa

SEQ ID NO: 579 - RNA, 20 nt, synthetic construct
  source 1..20: mol_type = other RNA
cacagagatattaagccaga

SEQ ID NO: 580 - RNA, 20 nt, synthetic construct
  source 1..20: mol_type = other RNA
acagagatattaagccagag

SEQ ID NO: 581 - RNA, 20 nt, synthetic construct
  source 1..20: mol_type = other RNA
cagagatattaagccagaga

SEQ ID NO: 582 - RNA, 20 nt, synthetic construct
  source 1..20: mol_type = other RNA
agagatattaagccagagaa

SEQ ID NO: 583 - RNA, 20 nt, synthetic construct
  source 1..20: mol_type = other RNA
gagatattaagccagagaac

SEQ ID NO: 584 - RNA, 20 nt, synthetic construct
  source 1..20: mol_type = other RNA
gccagagaacctgctgctgg

SEQ ID NO: 585 - RNA, 20 nt, synthetic construct
  source 1..20: mol_type = other RNA
agaacctgctgctggggttc

SEQ ID NO: 586 - RNA, 20 nt, synthetic construct
  source 1..20: mol_type = other RNA
ccagagaacctgctgctggg

SEQ ID NO: 587 - RNA, 20 nt, synthetic construct
  source 1..20: mol_type = other RNA
cagagaacctgctgctgggg

SEQ ID NO: 588 - RNA, 20 nt, synthetic construct
  source 1..20: mol_type = other RNA
agagaacctgctgctggggt

SEQ ID NO: 589 - RNA, 20 nt, synthetic construct
  source 1..20: mol_type = other RNA
gagaacctgctgctggggtt

SEQ ID NO: 590 - RNA, 20 nt, synthetic construct
  source 1..20: mol_type = other RNA
ggccctgaaggttctcttca

SEQ ID NO: 591 - RNA, 20 nt, synthetic construct
  source 1..20: mol_type = other RNA
cctgaaggttctcttcaagt

SEQ ID NO: 592 - RNA, 20 nt, synthetic construct
  source 1..20: mol_type = other RNA
gccctgaaggttctcttcaa

SEQ ID NO: 593 - RNA, 20 nt, synthetic construct
  source 1..20: mol_type = other RNA
ccctgaaggttctcttcaag

SEQ ID NO: 594 - RNA, 20 nt, synthetic construct
  source 1..20: mol_type = other RNA
ctgaaggttctcttcaagtc

SEQ ID NO: 595 - RNA, 20 nt, synthetic construct
  source 1..20: mol_type = other RNA
tgaaggttctcttcaagtcg

SEQ ID NO: 596 - RNA, 20 nt, synthetic construct
  source 1..20: mol_type = other RNA
ggcggacttcgggctctcca

SEQ ID NO: 597 - RNA, 20 nt, synthetic construct
  source 1..20: mol_type = other RNA
gtggcggacttcgggctctc

SEQ ID NO: 598 - RNA, 20 nt, synthetic construct
  source 1..20: mol_type = other RNA
tggcggacttcgggctctcc

SEQ ID NO: 599 - RNA, 20 nt, synthetic construct
  source 1..20: mol_type = other RNA
gcggacttcgggctctccaa

SEQ ID NO: 600 - RNA, 20 nt, synthetic construct
  source 1..20: mol_type = other RNA
cggacttcgggctctccaag

SEQ ID NO: 601 - RNA, 20 nt, synthetic construct
  source 1..20: mol_type = other RNA
gggacctggcggccaggaac

SEQ ID NO: 602 - RNA, 20 nt, synthetic construct
  source 1..20: mol_type = other RNA
caccgggacctggcggccag

SEQ ID NO: 603 - RNA, 20 nt, synthetic construct
  source 1..20: mol_type = other RNA
accgggacctggcggccagg

SEQ ID NO: 604 - RNA, 20 nt, synthetic construct
  source 1..20: mol_type = other RNA
ccgggacctggcggccagga

SEQ ID NO: 605 - RNA, 20 nt, synthetic construct
  source 1..20: mol_type = other RNA
cgggacctggcggccaggaa

SEQ ID NO: 606 - RNA, 20 nt, synthetic construct
  source 1..20: mol_type = other RNA
ggccaggaactgcatgtgag

SEQ ID NO: 607 - RNA, 20 nt, synthetic construct
  source 1..20: mol_type = other RNA
gccaggaactgcatgtgagt

SEQ ID NO: 608 - RNA, 20 nt, synthetic construct
  source 1..20: mol_type = other RNA
ccaggaactgcatgtgagtg

SEQ ID NO: 609 - RNA, 20 nt, synthetic construct
  source 1..20: mol_type = other RNA
caggaactgcatgtgagtgc

SEQ ID NO: 610 - RNA, 20 nt, synthetic construct
  source 1..20: mol_type = other RNA
aggaactgcatgtgagtgcc

SEQ ID NO: 611 - RNA, 20 nt, synthetic construct
  source 1..20: mol_type = other RNA
ggaactgcatgtgagtgcct

SEQ ID NO: 612 - RNA, 20 nt, synthetic construct
  source 1..20: mol_type = other RNA
gctgtgaagacgatgaagag

SEQ ID NO: 613 - RNA, 20 nt, synthetic construct
  source 1..20: mol_type = other RNA
tgtgaagacgatgaagagtg

SEQ ID NO: 614 - RNA, 20 nt, synthetic construct
  source 1..20: mol_type = other RNA
ggctgtgaagacgatgaaga

SEQ ID NO: 615 - RNA, 20 nt, synthetic construct
  source 1..20: mol_type = other RNA
ctgtgaagacgatgaagagt

SEQ ID NO: 616 - RNA, 20 nt, synthetic construct
  source 1..20: mol_type = other RNA
gtgaagacgatgaagagtga

SEQ ID NO: 617 - RNA, 20 nt, synthetic construct
  source 1..20: mol_type = other RNA
tgaagacgatgaagagtgag

SEQ ID NO: 618 - RNA, 20 nt, synthetic construct
  source 1..20: mol_type = other RNA
caccgcgacctgcgggcggc

SEQ ID NO: 619 - RNA, 20 nt, synthetic construct
  source 1..20: mol_type = other RNA
accgcgacctgcgggcggcc

SEQ ID NO: 620 - RNA, 20 nt, synthetic construct
  source 1..20: mol_type = other RNA
ccgcgacctgcgggcggcca

SEQ ID NO: 621 - RNA, 20 nt, synthetic construct
  source 1..20: mol_type = other RNA
cgcgacctgcgggcggccaa

SEQ ID NO: 622 - RNA, 20 nt, synthetic construct
  source 1..20: mol_type = other RNA
gcgacctgcgggcggccaac

SEQ ID NO: 623 - RNA, 20 nt, synthetic construct
  source 1..20: mol_type = other RNA
gcggccaacatcctggtgtc

SEQ ID NO: 624 - RNA, 20 nt, synthetic construct
  source 1..20: mol_type = other RNA
ggccaacatcctggtgtctg

SEQ ID NO: 625 - RNA, 20 nt, synthetic construct
  source 1..20: mol_type = other RNA
gccaacatcctggtgtctga

SEQ ID NO: 626 - RNA, 20 nt, synthetic construct
  source 1..20: mol_type = other RNA
ggcggccaacatcctggtgt

SEQ ID NO: 627 - RNA, 20 nt, synthetic construct
  source 1..20: mol_type = other RNA
cggccaacatcctggtgtct

SEQ ID NO: 628 - RNA, 20 nt, synthetic construct
  source 1..20: mol_type = other RNA
ccaacatcctggtgtctgag

SEQ ID NO: 629 - RNA, 20 nt, synthetic construct
  source 1..20: mol_type = other RNA
ggccattaagacgctgaagg

SEQ ID NO: 630 - RNA, 20 nt, synthetic construct
  source 1..20: mol_type = other RNA
gccattaagacgctgaagga

SEQ ID NO: 631 - RNA, 20 nt, synthetic construct
  source 1..20: mol_type = other RNA
ccattaagacgctgaaggag

SEQ ID NO: 632 - RNA, 20 nt, synthetic construct
  source 1..20: mol_type = other RNA
cattaagacgctgaaggagg

SEQ ID NO: 633 - RNA, 20 nt, synthetic construct
  source 1..20: mol_type = other RNA
attaagacgctgaaggaggg

SEQ ID NO: 634 - RNA, 20 nt, synthetic construct
  source 1..20: mol_type = other RNA
ttaagacgctgaaggaggga

SEQ ID NO: 635 - RNA, 20 nt, synthetic construct
  source 1..20: mol_type = other RNA
ctttgtgactttggcagtgc

SEQ ID NO: 636 - RNA, 20 nt, synthetic construct
  source 1..20: mol_type = other RNA
tttgtgactttggcagtgcc

SEQ ID NO: 637 - RNA, 20 nt, synthetic construct
  source 1..20: mol_type = other RNA
ttgtgactttggcagtgcca

SEQ ID NO: 638 - RNA, 20 nt, synthetic construct
  source 1..20: mol_type = other RNA
gtgactttggcagtgccact

SEQ ID NO: 639 - RNA, 20 nt, synthetic construct
  source 1..20: mol_type = other RNA
tgtgactttggcagtgccac

SEQ ID NO: 640 - RNA, 20 nt, synthetic construct
  source 1..20: mol_type = other RNA
caccgggatctgaaggtaag

SEQ ID NO: 641 - RNA, 20 nt, synthetic construct
  source 1..20: mol_type = other RNA
accgggatctgaaggtaaga

SEQ ID NO: 642 - RNA, 20 nt, synthetic construct
  source 1..20: mol_type = other RNA
ccgggatctgaaggtaagaa

SEQ ID NO: 643 - RNA, 20 nt, synthetic construct
  source 1..20: mol_type = other RNA
cgggatctgaaggtaagaac

SEQ ID NO: 644 - RNA, 20 nt, synthetic construct
  source 1..20: mol_type = other RNA
gggatctgaaggtaagaact

SEQ ID NO: 645 - RNA, 20 nt, synthetic construct
  source 1..20: mol_type = other RNA
tgcattgaagcgaatgtatg

SEQ ID NO: 646 - RNA, 20 nt, synthetic construct
  source 1..20: mol_type = other RNA
gcattgaagcgaatgtatgt

SEQ ID NO: 647 - RNA, 20 nt, synthetic construct
  source 1..20: mol_type = other RNA
cattgaagcgaatgtatgtc

SEQ ID NO: 648 - RNA, 20 nt, synthetic construct
  source 1..20: mol_type = other RNA
attgaagcgaatgtatgtca

SEQ ID NO: 649 - RNA, 20 nt, synthetic construct
  source 1..20: mol_type = other RNA
ttgaagcgaatgtatgtcaa

SEQ ID NO: 650 - RNA, 20 nt, synthetic construct
  source 1..20: mol_type = other RNA
tgaagcgaatgtatgtcaat

SEQ ID NO: 651 - RNA, 20 nt, synthetic construct
  source 1..20: mol_type = other RNA
attgctgacctgggccttgc

SEQ ID NO: 652 - RNA, 20 nt, synthetic construct
  source 1..20: mol_type = other RNA
ttgctgacctgggccttgct

SEQ ID NO: 653 - RNA, 20 nt, synthetic construct
  source 1..20: mol_type = other RNA
tgctgacctgggccttgctg

SEQ ID NO: 654 - RNA, 20 nt, synthetic construct
  source 1..20: mol_type = other RNA
gctgacctgggccttgctgt

SEQ ID NO: 655 - RNA, 20 nt, synthetic construct
  source 1..20: mol_type = other RNA
ctgacctgggccttgctgtt

SEQ ID NO: 656 - RNA, 20 nt, synthetic construct
  source 1..20: mol_type = other RNA
catcgagacctaaagagcaa

SEQ ID NO: 657 - RNA, 20 nt, synthetic construct
  source 1..20: mol_type = other RNA
atcgagacctaaagagcaaa

SEQ ID NO: 658 - RNA, 20 nt, synthetic construct
  source 1..20: mol_type = other RNA
tcgagacctaaagagcaaaa

SEQ ID NO: 659 - RNA, 20 nt, synthetic construct
  source 1..20: mol_type = other RNA
aaaacatcctcatcaagaaa

SEQ ID NO: 660 - RNA, 20 nt, synthetic construct
  source 1..20: mol_type = other RNA
gtgaaagtattctttaccac

SEQ ID NO: 661 - RNA, 20 nt, synthetic construct
  source 1..20: mol_type = other RNA
ggcggtgaaagtattcttta

SEQ ID NO: 662 - RNA, 20 nt, synthetic construct
  source 1..20: mol_type = other RNA
gcggtgaaagtattctttac

SEQ ID NO: 663 - RNA, 20 nt, synthetic construct
  source 1..20: mol_type = other RNA
cggtgaaagtattctttacc

SEQ ID NO: 664 - RNA, 20 nt, synthetic construct
  source 1..20: mol_type = other RNA
ggtgaaagtattctttacca

SEQ ID NO: 665 - RNA, 20 nt, synthetic construct
  source 1..20: mol_type = other RNA
tgaaagtattctttaccact

SEQ ID NO: 666 - RNA, 20 nt, synthetic construct
  source 1..20: mol_type = other RNA
gaaagtattctttaccactg

SEQ ID NO: 667 - RNA, 20 nt, synthetic construct
  source 1..20: mol_type = other RNA
attgctgacctgggcctggc

SEQ ID NO: 668 - RNA, 20 nt, synthetic construct
  source 1..20: mol_type = other RNA
ttgctgacctgggcctggct

SEQ ID NO: 669 - RNA, 20 nt, synthetic construct
  source 1..20: mol_type = other RNA
tgctgacctgggcctggctg

SEQ ID NO: 670 - RNA, 20 nt, synthetic construct
  source 1..20: mol_type = other RNA
gctgacctgggcctggctgt

SEQ ID NO: 671 - RNA, 20 nt, synthetic construct
  source 1..20: mol_type = other RNA
ctgacctgggcctggctgtt

SEQ ID NO: 672 - RNA, 20 nt, synthetic construct
  source 1..20: mol_type = other RNA
catcgagatctgaaaagtaa

SEQ ID NO: 673 - RNA, 20 nt, synthetic construct
  source 1..20: mol_type = other RNA
atcgagatctgaaaagtaaa

SEQ ID NO: 674 - RNA, 20 nt, synthetic construct
  source 1..20: mol_type = other RNA
tcgagatctgaaaagtaaaa

SEQ ID NO: 675 - RNA, 20 nt, synthetic construct
  source 1..20: mol_type = other RNA
aaaacattctggtgaagaaa

SEQ ID NO: 676 - RNA, 20 nt, synthetic construct
  source 1..20: mol_type = other RNA
gtgaaagtgttcttcaccac

SEQ ID NO: 677 - RNA, 20 nt, synthetic construct
  source 1..20: mol_type = other RNA
gaaagtgttcttcaccacag

SEQ ID NO: 678 - RNA, 20 nt, synthetic construct
  source 1..20: mol_type = other RNA
agctgtgaaagtgttcttca

SEQ ID NO: 679 - RNA, 20 nt, synthetic construct
  source 1..20: mol_type = other RNA
gctgtgaaagtgttcttcac

SEQ ID NO: 680 - RNA, 20 nt, synthetic construct
  source 1..20: mol_type = other RNA
ctgtgaaagtgttcttcacc

SEQ ID NO: 681 - RNA, 20 nt, synthetic construct
  source 1..20: mol_type = other RNA
tgtgaaagtgttcttcacca

SEQ ID NO: 682 - RNA, 20 nt, synthetic construct
  source 1..20: mol_type = other RNA
tgaaagtgttcttcaccaca

SEQ ID NO: 683 - RNA, 20 nt, synthetic construct
  source 1..20: mol_type = other RNA
tagtgactttggactgtcca

SEQ ID NO: 684 - RNA, 20 nt, synthetic construct
  source 1..20: mol_type = other RNA
gtgactttggactgtccatg

SEQ ID NO: 685 - RNA, 20 nt, synthetic construct
  source 1..20: mol_type = other RNA
attagtgactttggactgtc

SEQ ID NO: 686 - RNA, 20 nt, synthetic construct
  source 1..20: mol_type = other RNA
ttagtgactttggactgtcc

SEQ ID NO: 687 - RNA, 20 nt, synthetic construct
  source 1..20: mol_type = other RNA
agtgactttggactgtccat

SEQ ID NO: 688 - RNA, 20 nt, synthetic construct
  source 1..20: mol_type = other RNA
cgagatttaaacagcagaaa

SEQ ID NO: 689 - RNA, 20 nt, synthetic construct
  source 1..20: mol_type = other RNA
catcgagatttaaacagcag

SEQ ID NO: 690 - RNA, 20 nt, synthetic construct
  source 1..20: mol_type = other RNA
atcgagatttaaacagcaga

SEQ ID NO: 691 - RNA, 20 nt, synthetic construct
  source 1..20: mol_type = other RNA
tcgagatttaaacagcagaa

SEQ ID NO: 692 - RNA, 20 nt, synthetic construct
  source 1..20: mol_type = other RNA
gagatttaaacagcagaaat

SEQ ID NO: 693 - RNA, 20 nt, synthetic construct
  source 1..20: mol_type = other RNA
cagcagaaatgtcctagtga

SEQ ID NO: 694 - RNA, 20 nt, synthetic construct
  source 1..20: mol_type = other RNA
agcagaaatgtcctagtgaa

SEQ ID NO: 695 - RNA, 20 nt, synthetic construct
  source 1..20: mol_type = other RNA
gcagaaatgtcctagtgaaa

SEQ ID NO: 696 - RNA, 20 nt, synthetic construct
  source 1..20: mol_type = other RNA
cagaaatgtcctagtgaaaa

SEQ ID NO: 697 - RNA, 20 nt, synthetic construct
  source 1..20: mol_type = other RNA
tatctgactttggaatgaca

SEQ ID NO: 698 - RNA, 20 nt, synthetic construct
  source 1..20: mol_type = other RNA
atctgactttggaatgacaa

SEQ ID NO: 699 - RNA, 20 nt, synthetic construct
  source 1..20: mol_type = other RNA
gtatctgactttggaatgac

SEQ ID NO: 700 - RNA, 20 nt, synthetic construct
  source 1..20: mol_type = other RNA
tctgactttggaatgacaag

SEQ ID NO: 701 - RNA, 20 nt, synthetic construct
  source 1..20: mol_type = other RNA
ctgactttggaatgacaagg

SEQ ID NO: 702 - RNA, 20 nt, synthetic construct
  source 1..20: mol_type = other RNA
caccgggacttggtaagcaa

SEQ ID NO: 703 - RNA, 20 nt, synthetic construct
  source 1..20: mol_type = other RNA
accgggacttggtaagcaaa

SEQ ID NO: 704 - RNA, 20 nt, synthetic construct
  source 1..20: mol_type = other RNA
ccgggacttggtaagcaaag

SEQ ID NO: 705 - RNA, 20 nt, synthetic construct
  source 1..20: mol_type = other RNA
cgggacttggtaagcaaagc

SEQ ID NO: 706 - RNA, 20 nt, synthetic construct
  source 1..20: mol_type = other RNA
gggacttggtaagcaaagcc

SEQ ID NO: 707 - RNA, 20 nt, synthetic construct
  source 1..20: mol_type = other RNA
ctcgtaactgcttggtggac

SEQ ID NO: 708 - RNA, 20 nt, synthetic construct
  source 1..20: mol_type = other RNA
cgtaactgcttggtggacag

SEQ ID NO: 709 - RNA, 20 nt, synthetic construct
  source 1..20: mol_type = other RNA
tgctcgtaactgcttggtgg

SEQ ID NO: 710 - RNA, 20 nt, synthetic construct
  source 1..20: mol_type = other RNA
gctcgtaactgcttggtgga

SEQ ID NO: 711 - RNA, 20 nt, synthetic construct
  source 1..20: mol_type = other RNA
tcgtaactgcttggtggaca

SEQ ID NO: 712 - RNA, 20 nt, synthetic construct
  source 1..20: mol_type = other RNA
gtaactgcttggtggacaga

SEQ ID NO: 713 - RNA, 20 nt, synthetic construct
  source 1..20: mol_type = other RNA
tgctgttaagatgatcaagg

SEQ ID NO: 714 - RNA, 20 nt, synthetic construct
  source 1..20: mol_type = other RNA
gctgttaagatgatcaagga

SEQ ID NO: 715 - RNA, 20 nt, synthetic construct
  source 1..20: mol_type = other RNA
ctgttaagatgatcaaggag

SEQ ID NO: 716 - RNA, 20 nt, synthetic construct
  source 1..20: mol_type = other RNA
tgttaagatgatcaaggagg

SEQ ID NO: 717 - RNA, 20 nt, synthetic construct
  source 1..20: mol_type = other RNA
gttaagatgatcaaggaggg

SEQ ID NO: 718 - RNA, 20 nt, synthetic construct
  source 1..20: mol_type = other RNA
ttaagatgatcaaggagggc

SEQ ID NO: 719 - RNA, 20 nt, synthetic construct
  source 1..20: mol_type = other RNA
acagagacctcaagagtaat

SEQ ID NO: 720 - RNA, 20 nt, synthetic construct
  source 1..20: mol_type = other RNA
gagacctcaagagtaatagt

SEQ ID NO: 721 - RNA, 20 nt, synthetic construct
  source 1..20: mol_type = other RNA
agagacctcaagagtaatag

SEQ ID NO: 722 - RNA, 20 nt, synthetic construct
  source 1..20: mol_type = other RNA
cagagacctcaagagtaata

SEQ ID NO: 723 - RNA, 20 nt, synthetic construct
  source 1..20: mol_type = other RNA
cacagagacctcaagagtaa

SEQ ID NO: 724 - RNA, 20 nt, synthetic construct
  source 1..20: mol_type = other RNA
tcagatatatttcttcatga

SEQ ID NO: 725 - RNA, 20 nt, synthetic construct
  source 1..20: mol_type = other RNA
acctcagatatatttcttca

SEQ ID NO: 726 - RNA, 20 nt, synthetic construct
  source 1..20: mol_type = other RNA
cagatatatttcttcatgaa

SEQ ID NO: 727 - RNA, 20 nt, synthetic construct
  source 1..20: mol_type = other RNA
ctcagatatatttcttcatg

SEQ ID NO: 728 - RNA, 20 nt, synthetic construct
  source 1..20: mol_type = other RNA
cctcagatatatttcttcat

SEQ ID NO: 729 - RNA, 20 nt, synthetic construct
  source 1..20: mol_type = other RNA
aatagtatccttcctgaaat

SEQ ID NO: 730 - RNA, 20 nt, synthetic construct
  source 1..20: mol_type = other RNA
taatagtatccttcctgaaa

SEQ ID NO: 731 - RNA, 20 nt, synthetic construct
  source 1..20: mol_type = other RNA
gtaatagtatccttcctgaa

SEQ ID NO: 732 - RNA, 20 nt, synthetic construct
  source 1..20: mol_type = other RNA
agtaatagtatccttcctga

SEQ ID NO: 733 - RNA, 20 nt, synthetic construct
  source 1..20: mol_type = other RNA
gagtaatagtatccttcctg

SEQ ID NO: 734 - RNA, 20 nt, synthetic construct
  source 1..20: mol_type = other RNA
gtgaaaatgttgaatgtgac

SEQ ID NO: 735 - RNA, 20 nt, synthetic construct
  source 1..20: mol_type = other RNA
ggcagtgaaaatgttgaatg

SEQ ID NO: 736 - RNA, 20 nt, synthetic construct
  source 1..20: mol_type = other RNA
gaaaatgttgaatgtgacag

SEQ ID NO: 737 - RNA, 20 nt, synthetic construct
  source 1..20: mol_type = other RNA
tgaaaatgttgaatgtgaca

SEQ ID NO: 738 - RNA, 20 nt, synthetic construct
  source 1..20: mol_type = other RNA
agtgaaaatgttgaatgtga

SEQ ID NO: 739 - RNA, 20 nt, synthetic construct
  source 1..20: mol_type = other RNA
cagtgaaaatgttgaatgtg

SEQ ID NO: 740 - RNA, 20 nt, synthetic construct
  source 1..20: mol_type = other RNA
gcagtgaaaatgttgaatgt

SEQ ID NO: 741 - RNA, 20 nt, synthetic construct
  source 1..20: mol_type = other RNA
attgcagacttcggcatggc

SEQ ID NO: 742 - RNA, 20 nt, synthetic construct
  source 1..20: mol_type = other RNA
ttgcagacttcggcatggcg

SEQ ID NO: 743 - RNA, 20 nt, synthetic construct
  source 1..20: mol_type = other RNA
tgcagacttcggcatggcgt

SEQ ID NO: 744 - RNA, 20 nt, synthetic construct
  source 1..20: mol_type = other RNA
gcagacttcggcatggcgtc

SEQ ID NO: 745 - RNA, 20 nt, synthetic construct
  source 1..20: mol_type = other RNA
cagacttcggcatggcgtcc

SEQ ID NO: 746 - RNA, 20 nt, synthetic construct
  source 1..20: mol_type = other RNA
cacagagacctaaagcccga

SEQ ID NO: 747 - RNA, 20 nt, synthetic construct
  source 1..20: mol_type = other RNA
acagagacctaaagcccgag

SEQ ID NO: 748 - RNA, 20 nt, synthetic construct
  source 1..20: mol_type = other RNA
cagagacctaaagcccgaga

SEQ ID NO: 749 - RNA, 20 nt, synthetic construct
  source 1..20: mol_type = other RNA
agagacctaaagcccgagaa

SEQ ID NO: 750 - RNA, 20 nt, synthetic construct
  source 1..20: mol_type = other RNA
gagacctaaagcccgagaac

SEQ ID NO: 751 - RNA, 20 nt, synthetic construct
  source 1..20: mol_type = other RNA
cgccatcaagatcgtgaacc

SEQ ID NO: 752 - RNA, 20 nt, synthetic construct
  source 1..20: mol_type = other RNA
gccatcaagatcgtgaaccg

SEQ ID NO: 753 - RNA, 20 nt, synthetic construct
  source 1..20: mol_type = other RNA
catcaagatcgtgaaccggg

SEQ ID NO: 754 - RNA, 20 nt, synthetic construct
  source 1..20: mol_type = other RNA
ccatcaagatcgtgaaccgg

SEQ ID NO: 755 - RNA, 20 nt, synthetic construct
  source 1..20: mol_type = other RNA
atcaagatcgtgaaccggga

SEQ ID NO: 756 - RNA, 20 nt, synthetic construct
  source 1..20: mol_type = other RNA
tcaagatcgtgaaccgggag

SEQ ID NO: 757 - RNA, 20 nt, synthetic construct
  source 1..20: mol_type = other RNA
atcgcagactttggcatggc

SEQ ID NO: 758 - RNA, 20 nt, synthetic construct
  source 1..20: mol_type = other RNA
tcgcagactttggcatggcg

SEQ ID NO: 759 - RNA, 20 nt, synthetic construct
  source 1..20: mol_type = other RNA
cgcagactttggcatggcgt

SEQ ID NO: 760 - RNA, 20 nt, synthetic construct
  source 1..20: mol_type = other RNA
gcagactttggcatggcgtc

SEQ ID NO: 761 - RNA, 20 nt, synthetic construct
  source 1..20: mol_type = other RNA
cagactttggcatggcgtcc

SEQ ID NO: 762 - RNA, 20 nt, synthetic construct
  source 1..20: mol_type = other RNA
acagggatctgaaacctgaa

SEQ ID NO: 763 - RNA, 20 nt, synthetic construct
  source 1..20: mol_type = other RNA
cagggatctgaaacctgaaa

SEQ ID NO: 764 - RNA, 20 nt, synthetic construct
  source 1..20: mol_type = other RNA
agggatctgaaacctgaaaa

SEQ ID NO: 765 - RNA, 20 nt, synthetic construct
  source 1..20: mol_type = other RNA
gggatctgaaacctgaaaac

SEQ ID NO: 766 - RNA, 20 nt, synthetic construct
  source 1..20: mol_type = other RNA
cacagggatctgaaacctga

SEQ ID NO: 767 - RNA, 20 nt, synthetic construct
  source 1..20: mol_type = other RNA
cctgaaaacctcctgctgga

SEQ ID NO: 768 - RNA, 20 nt, synthetic construct
  source 1..20: mol_type = other RNA
tgaaaacctcctgctggacg

SEQ ID NO: 769 - RNA, 20 nt, synthetic construct
  source 1..20: mol_type = other RNA
acctgaaaacctcctgctgg

SEQ ID NO: 770 - RNA, 20 nt, synthetic construct
  source 1..20: mol_type = other RNA
ctgaaaacctcctgctggac

SEQ ID NO: 771 - RNA, 20 nt, synthetic construct
  source 1..20: mol_type = other RNA
gaaaacctcctgctggacga

SEQ ID NO: 772 - RNA, 20 nt, synthetic construct
  source 1..20: mol_type = other RNA
aaaacctcctgctggacgag

SEQ ID NO: 773 - RNA, 20 nt, synthetic construct
  source 1..20: mol_type = other RNA
gccatcaagatcgtcaaccg

SEQ ID NO: 774 - RNA, 20 nt, synthetic construct
  source 1..20: mol_type = other RNA
catcaagatcgtcaaccgtg

SEQ ID NO: 775 - RNA, 20 nt, synthetic construct
  source 1..20: mol_type = other RNA
ggccatcaagatcgtcaacc

SEQ ID NO: 776 - RNA, 20 nt, synthetic construct
  source 1..20: mol_type = other RNA
ccatcaagatcgtcaaccgt

SEQ ID NO: 777 - RNA, 20 nt, synthetic construct
  source 1..20: mol_type = other RNA
atcaagatcgtcaaccgtga

SEQ ID NO: 778 - RNA, 20 nt, synthetic construct
  source 1..20: mol_type = other RNA
tcaagatcgtcaaccgtgag

SEQ ID NO: 779 - RNA, 20 nt, synthetic construct
  source 1..20: mol_type = other RNA
ctgatttcggcctgtccagg

SEQ ID NO: 780 - RNA, 20 nt, synthetic construct
  source 1..20: mol_type = other RNA
atctgatttcggcctgtcca

SEQ ID NO: 781 - RNA, 20 nt, synthetic construct
  source 1..20: mol_type = other RNA
tatctgatttcggcctgtcc

SEQ ID NO: 782 - RNA, 20 nt, synthetic construct
  source 1..20: mol_type = other RNA
tctgatttcggcctgtccag

SEQ ID NO: 783 - RNA, 20 nt, synthetic construct
  source 1..20: mol_type = other RNA
gtatctgatttcggcctgtc

SEQ ID NO: 784 - RNA, 20 nt, synthetic construct
  source 1..20: mol_type = other RNA
ccgagacctggtgggacctt

SEQ ID NO: 785 - RNA, 20 nt, synthetic construct
  source 1..20: mol_type = other RNA
gagacctggtgggaccttag

SEQ ID NO: 786 - RNA, 20 nt, synthetic construct
  source 1..20: mol_type = other RNA
cgagacctggtgggacctta

SEQ ID NO: 787 - RNA, 20 nt, synthetic construct
  source 1..20: mol_type = other RNA
accgagacctggtgggacct

SEQ ID NO: 788 - RNA, 20 nt, synthetic construct
  source 1..20: mol_type = other RNA
caccgagacctggtgggacc

SEQ ID NO: 789 - RNA, 20 nt, synthetic construct
  source 1..20: mol_type = other RNA
gctcgaaactgtttggtaaa

SEQ ID NO: 790 - RNA, 20 nt, synthetic construct
  source 1..20: mol_type = other RNA
gaaactgtttggtaaacgat

SEQ ID NO: 791 - RNA, 20 nt, synthetic construct
  source 1..20: mol_type = other RNA
cgaaactgtttggtaaacga

SEQ ID NO: 792 - RNA, 20 nt, synthetic construct
  source 1..20: mol_type = other RNA
tcgaaactgtttggtaaacg

SEQ ID NO: 793 - RNA, 20 nt, synthetic construct
  source 1..20: mol_type = other RNA
ctcgaaactgtttggtaaac

SEQ ID NO: 794 - RNA, 20 nt, synthetic construct
  source 1..20: mol_type = other RNA
agctcgaaactgtttggtaa

SEQ ID NO: 795 - RNA, 20 nt, synthetic construct
  source 1..20: mol_type = other RNA
ccatcaagatgatcaaagaa

SEQ ID NO: 796 - RNA, 20 nt, synthetic construct
  source 1..20: mol_type = other RNA
gccatcaagatgatcaaaga

SEQ ID NO: 797 - RNA, 20 nt, synthetic construct
  source 1..20: mol_type = other RNA
tcaagatgatcaaagaaggc

SEQ ID NO: 798 - RNA, 20 nt, synthetic construct
  source 1..20: mol_type = other RNA
atcaagatgatcaaagaagg

SEQ ID NO: 799 - RNA, 20 nt, synthetic construct
  source 1..20: mol_type = other RNA
catcaagatgatcaaagaag

SEQ ID NO: 800 - RNA, 20 nt, synthetic construct
  source 1..20: mol_type = other RNA
ggccatcaagatgatcaaag

SEQ ID NO: 801 - RNA, 20 nt, synthetic construct
  source 1..20: mol_type = other RNA
attgacctgggtcagagtat

SEQ ID NO: 802 - RNA, 20 nt, synthetic construct
  source 1..20: mol_type = other RNA
ttgacctgggtcagagtata

SEQ ID NO: 803 - RNA, 20 nt, synthetic construct
  source 1..20: mol_type = other RNA
gattgacctgggtcagagta

SEQ ID NO: 804 - RNA, 20 nt, synthetic construct
  source 1..20: mol_type = other RNA
tgattgacctgggtcagagt

SEQ ID NO: 805 - RNA, 20 nt, synthetic construct
  source 1..20: mol_type = other RNA
ctgattgacctgggtcagag

SEQ ID NO: 806 - RNA, 20 nt, synthetic construct
  source 1..20: mol_type = other RNA
gagacattaaaccagacaat

SEQ ID NO: 807 - RNA, 20 nt, synthetic construct
  source 1..20: mol_type = other RNA
ggagacattaaaccagacaa

SEQ ID NO: 808 - RNA, 20 nt, synthetic construct
  source 1..20: mol_type = other RNA
tggagacattaaaccagaca

SEQ ID NO: 809 - RNA, 20 nt, synthetic construct
  source 1..20: mol_type = other RNA
atggagacattaaaccagac

SEQ ID NO: 810 - RNA, 20 nt, synthetic construct
  source 1..20: mol_type = other RNA
catggagacattaaaccaga

SEQ ID NO: 811 - RNA, 20 nt, synthetic construct
  source 1..20: mol_type = other RNA
acaatttcatacttggaaac

SEQ ID NO: 812 - RNA, 20 nt, synthetic construct
  source 1..20: mol_type = other RNA
gacaatttcatacttggaaa

SEQ ID NO: 813 - RNA, 20 nt, synthetic construct
  source 1..20: mol_type = other RNA
agacaatttcatacttggaa

SEQ ID NO: 814 - RNA, 20 nt, synthetic construct
  source 1..20: mol_type = other RNA
cagacaatttcatacttgga

SEQ ID NO: 815 - RNA, 20 nt, synthetic construct
  source 1..20: mol_type = other RNA
ccagacaatttcatacttgg

SEQ ID NO: 816 - RNA, 20 nt, synthetic construct
  source 1..20: mol_type = other RNA
accagacaatttcatacttg

SEQ ID NO: 817 - RNA, 20 nt, synthetic construct
  source 1..20: mol_type = other RNA
taaaggtaaatgacctgagt

SEQ ID NO: 818 - RNA, 20 nt, synthetic construct
  source 1..20: mol_type = other RNA
ttaaaggtaaatgacctgag

SEQ ID NO: 819 - RNA, 20 nt, synthetic construct
  source 1..20: mol_type = other RNA
tttaaaggtaaatgacctga

SEQ ID NO: 820 - RNA, 20 nt, synthetic construct
  source 1..20: mol_type = other RNA
atggtgacttgagtccaagg

SEQ ID NO: 821 - RNA, 20 nt, synthetic construct
  source 1..20: mol_type = other RNA
catggtgacttgagtccaag

SEQ ID NO: 822 - RNA, 20 nt, synthetic construct
  source 1..20: mol_type = other RNA
tggtgacttgagtccaaggt

SEQ ID NO: 823 - RNA, 20 nt, synthetic construct
  source 1..20: mol_type = other RNA
ggtgacttgagtccaaggtg

SEQ ID NO: 824 - RNA, 20 nt, synthetic construct
  source 1..20: mol_type = other RNA
gtgacttgagtccaaggtgt

SEQ ID NO: 825 - RNA, 20 nt, synthetic construct
  source 1..20: mol_type = other RNA
agtaataaaggtgggactga

SEQ ID NO: 826 - RNA, 20 nt, synthetic construct
  source 1..20: mol_type = other RNA
gtaataaaggtgggactgat

SEQ ID NO: 827 - RNA, 20 nt, synthetic construct
  source 1..20: mol_type = other RNA
taataaaggtgggactgatt

SEQ ID NO: 828 - RNA, 20 nt, synthetic construct
  source 1..20: mol_type = other RNA
aataaaggtgggactgattc

SEQ ID NO: 829 - RNA, 20 nt, synthetic construct
  source 1..20: mol_type = other RNA
ataaaggtgggactgattct

SEQ ID NO: 830 - RNA, 20 nt, synthetic construct
  source 1..20: mol_type = other RNA
taaaggtgggactgattctt

SEQ ID NO: 831 - RNA, 20 nt, synthetic construct
  source 1..20: mol_type = other RNA
ctccgactttggcctctcca

SEQ ID NO: 832 - RNA, 20 nt, synthetic construct
  source 1..20: mol_type = other RNA
ccgactttggcctctccaag

SEQ ID NO: 833 - RNA, 20 nt, synthetic construct
  source 1..20: mol_type = other RNA
tccgactttggcctctccaa

SEQ ID NO: 834 - RNA, 20 nt, synthetic construct
  source 1..20: mol_type = other RNA
tctccgactttggcctctcc

SEQ ID NO: 835 - RNA, 20 nt, synthetic construct
  source 1..20: mol_type = other RNA
atctccgactttggcctctc

SEQ ID NO: 836 - RNA, 20 nt, synthetic construct
  source 1..20: mol_type = other RNA
gggatctcaaggtggggctc

SEQ ID NO: 837 - RNA, 20 nt, synthetic construct
  source 1..20: mol_type = other RNA
cgggatctcaaggtggggct

SEQ ID NO: 838 - RNA, 20 nt, synthetic construct
  source 1..20: mol_type = other RNA
ccgggatctcaaggtggggc

SEQ ID NO: 839 - RNA, 20 nt, synthetic construct
  source 1..20: mol_type = other RNA
accgggatctcaaggtgggg

SEQ ID NO: 840 - RNA, 20 nt, synthetic construct
  source 1..20: mol_type = other RNA
caccgggatctcaaggtggg

SEQ ID NO: 841 - RNA, 20 nt, synthetic construct
  source 1..20: mol_type = other RNA
cagagaatctgctgtactac

SEQ ID NO: 842 - RNA, 20 nt, synthetic construct
  source 1..20: mol_type = other RNA
agaatctgctgtactacagc

SEQ ID NO: 843 - RNA, 20 nt, synthetic construct
  source 1..20: mol_type = other RNA
gagaatctgctgtactacag

SEQ ID NO: 844 - RNA, 20 nt, synthetic construct
  source 1..20: mol_type = other RNA
agagaatctgctgtactaca

SEQ ID NO: 845 - RNA, 20 nt, synthetic construct
  source 1..20: mol_type = other RNA
ccagagaatctgctgtacta

SEQ ID NO: 846 - RNA, 20 nt, synthetic construct
  source 1..20: mol_type = other RNA
gccagagaatctgctgtact

SEQ ID NO: 847 - RNA, 20 nt, synthetic construct
  source 1..20: mol_type = other RNA
atcaaatgcattgccaagga

SEQ ID NO: 848 - RNA, 20 nt, synthetic construct
  source 1..20: mol_type = other RNA
catcaaatgcattgccaagg

SEQ ID NO: 849 - RNA, 20 nt, synthetic construct
  source 1..20: mol_type = other RNA
gccatcaaatgcattgccaa

SEQ ID NO: 850 - RNA, 20 nt, synthetic construct
  source 1..20: mol_type = other RNA
ggccatcaaatgcattgcca

SEQ ID NO: 851 - RNA, 20 nt, synthetic construct
  source 1..20: mol_type = other RNA
caaatgcattgccaaggagg

SEQ ID NO: 852 - RNA, 20 nt, synthetic construct
  source 1..20: mol_type = other RNA
tcaaatgcattgccaaggag

SEQ ID NO: 853 - RNA, 20 nt, synthetic construct
  source 1..20: mol_type = other RNA
ccatcaaatgcattgccaag

SEQ ID NO: 854 - RNA, 20 nt, synthetic construct
  source 1..20: mol_type = other RNA
atcagtgactttggattgtc

SEQ ID NO: 855 - RNA, 20 nt, synthetic construct
  source 1..20: mol_type = other RNA
tcagtgactttggattgtca

SEQ ID NO: 856 - RNA, 20 nt, synthetic construct
  source 1..20: mol_type = other RNA
cagtgactttggattgtcaa

SEQ ID NO: 857 - RNA, 20 nt, synthetic construct
  source 1..20: mol_type = other RNA
agtgactttggattgtcaaa

SEQ ID NO: 858 - RNA, 20 nt, synthetic construct
  source 1..20: mol_type = other RNA
gtgactttggattgtcaaaa

SEQ ID NO: 859 - RNA, 20 nt, synthetic construct
  source 1..20: mol_type = other RNA
acagagacctcaaggtgagg

SEQ ID NO: 860 - RNA, 20 nt, synthetic construct
  source 1..20: mol_type = other RNA
cagagacctcaaggtgaggc

SEQ ID NO: 861 - RNA, 20 nt, synthetic construct
  source 1..20: mol_type = other RNA
agagacctcaaggtgaggcc

SEQ ID NO: 862 - RNA, 20 nt, synthetic construct
  source 1..20: mol_type = other RNA
gagacctcaaggtgaggcca

SEQ ID NO: 863 - RNA, 20 nt, synthetic construct
  source 1..20: mol_type = other RNA
cacagagacctcaaggtgag

SEQ ID NO: 864 - RNA, 20 nt, synthetic construct
  source 1..20: mol_type = other RNA
ccgaaaatctcttgtactac

SEQ ID NO: 865 - RNA, 20 nt, synthetic construct
  source 1..20: mol_type = other RNA
gcccgaaaatctcttgtact

SEQ ID NO: 866 - RNA, 20 nt, synthetic construct
  source 1..20: mol_type = other RNA
cccgaaaatctcttgtacta

SEQ ID NO: 867 - RNA, 20 nt, synthetic construct
  source 1..20: mol_type = other RNA
cgaaaatctcttgtactaca

SEQ ID NO: 868 - RNA, 20 nt, synthetic construct
  source 1..20: mol_type = other RNA
gaaaatctcttgtactacag

SEQ ID NO: 869 - RNA, 20 nt, synthetic construct
  source 1..20: mol_type = other RNA
aaaatctcttgtactacagt

SEQ ID NO: 870 - RNA, 20 nt, synthetic construct
  source 1..20: mol_type = other RNA
tgctgtgaagtgtatcccta

SEQ ID NO: 871 - RNA, 20 nt, synthetic construct
  source 1..20: mol_type = other RNA
tgtgaagtgtatccctaaga

SEQ ID NO: 872 - RNA, 20 nt, synthetic construct
  source 1..20: mol_type = other RNA
gtgaagtgtatccctaagaa

SEQ ID NO: 873 - RNA, 20 nt, synthetic construct
  source 1..20: mol_type = other RNA
gctgtgaagtgtatccctaa

SEQ ID NO: 874 - RNA, 20 nt, synthetic construct
  source 1..20: mol_type = other RNA
ctgtgaagtgtatccctaag

SEQ ID NO: 875 - RNA, 20 nt, synthetic construct
  source 1..20: mol_type = other RNA
tgaagtgtatccctaagaag

SEQ ID NO: 876 - RNA, 20 nt, synthetic construct
  source 1..20: mol_type = other RNA
cactgactttggtctgtcca

SEQ ID NO: 877 - RNA, 20 nt, synthetic construct
  source 1..20: mol_type = other RNA
atcactgactttggtctgtc

SEQ ID NO: 878 - RNA, 20 nt, synthetic construct
  source 1..20: mol_type = other RNA
tcactgactttggtctgtcc

SEQ ID NO: 879 - RNA, 20 nt, synthetic construct
  source 1..20: mol_type = other RNA
actgactttggtctgtccaa

SEQ ID NO: 880 - RNA, 20 nt, synthetic construct
  source 1..20: mol_type = other RNA
ctgactttggtctgtccaag

SEQ ID NO: 881 - RNA, 20 nt, synthetic construct
  source 1..20: mol_type = other RNA
acagagacttaaaggtgtca

SEQ ID NO: 882 - RNA, 20 nt, synthetic construct
  source 1..20: mol_type = other RNA
cagagacttaaaggtgtcaa

SEQ ID NO: 883 - RNA, 20 nt, synthetic construct
  source 1..20: mol_type = other RNA
gagacttaaaggtgtcaagg

SEQ ID NO: 884 - RNA, 20 nt, synthetic construct
  source 1..20: mol_type = other RNA
cacagagacttaaaggtgtc

SEQ ID NO: 885 - RNA, 20 nt, synthetic construct
  source 1..20: mol_type = other RNA
agagacttaaaggtgtcaag

SEQ ID NO: 886 - RNA, 20 nt, synthetic construct
  source 1..20: mol_type = other RNA
gcccgaaaacctgctttacc

SEQ ID NO: 887 - RNA, 20 nt, synthetic construct
  source 1..20: mol_type = other RNA
cccgaaaacctgctttacct

SEQ ID NO: 888 - RNA, 20 nt, synthetic construct
  source 1..20: mol_type = other RNA
ccgaaaacctgctttacctt

SEQ ID NO: 889 - RNA, 20 nt, synthetic construct
  source 1..20: mol_type = other RNA
cgaaaacctgctttacctta

SEQ ID NO: 890 - RNA, 20 nt, synthetic construct
  source 1..20: mol_type = other RNA
gaaaacctgctttaccttac

SEQ ID NO: 891 - RNA, 20 nt, synthetic construct
  source 1..20: mol_type = other RNA
aaaacctgctttaccttacc

SEQ ID NO: 892 - RNA, 20 nt, synthetic construct
  source 1..20: mol_type = other RNA
tgctctgaagtgcatcaaga

SEQ ID NO: 893 - RNA, 20 nt, synthetic construct
  source 1..20: mol_type = other RNA
gctctgaagtgcatcaagaa

SEQ ID NO: 894 - RNA, 20 nt, synthetic construct
  source 1..20: mol_type = other RNA
ctctgaagtgcatcaagaag

SEQ ID NO: 895 - RNA, 20 nt, synthetic construct
  source 1..20: mol_type = other RNA
tctgaagtgcatcaagaagt

SEQ ID NO: 896 - RNA, 20 nt, synthetic construct
  source 1..20: mol_type = other RNA
ctgaagtgcatcaagaagtc

SEQ ID NO: 897 - RNA, 20 nt, synthetic construct
  source 1..20: mol_type = other RNA
tgaagtgcatcaagaagtca

SEQ ID NO: 898 - RNA, 20 nt, synthetic construct
  source 1..20: mol_type = other RNA
gcagactttggcctggccat

SEQ ID NO: 899 - RNA, 20 nt, synthetic construct
  source 1..20: mol_type = other RNA
cagactttggcctggccata

SEQ ID NO: 900 - RNA, 20 nt, synthetic construct
  source 1..20: mol_type = other RNA
ggcagactttggcctggcca

SEQ ID NO: 901 - RNA, 20 nt, synthetic construct
  source 1..20: mol_type = other RNA
tggcagactttggcctggcc

SEQ ID NO: 902 - RNA, 20 nt, synthetic construct
  source 1..20: mol_type = other RNA
ctggcagactttggcctggc

SEQ ID NO: 903 - RNA, 20 nt, synthetic construct
  source 1..20: mol_type = other RNA
gggacctgaaggtgagcaac

SEQ ID NO: 904 - RNA, 20 nt, synthetic construct
  source 1..20: mol_type = other RNA
cgggacctgaaggtgagcaa

SEQ ID NO: 905 - RNA, 20 nt, synthetic construct
  source 1..20: mol_type = other RNA
ccgggacctgaaggtgagca

SEQ ID NO: 906 - RNA, 20 nt, synthetic construct
  source 1..20: mol_type = other RNA
caccgggacctgaaggtgag

SEQ ID NO: 907 - RNA, 20 nt, synthetic construct
  source 1..20: mol_type = other RNA
accgggacctgaaggtgagc

SEQ ID NO: 908 - RNA, 20 nt, synthetic construct
  source 1..20: mol_type = other RNA
agaatctgttgctggcctcc

SEQ ID NO: 909 - RNA, 20 nt, synthetic construct
  source 1..20: mol_type = other RNA
gagaatctgttgctggcctc

SEQ ID NO: 910 - RNA, 20 nt, synthetic construct
  source 1..20: mol_type = other RNA
tgagaatctgttgctggcct

SEQ ID NO: 911 - RNA, 20 nt, synthetic construct
  source 1..20: mol_type = other RNA
ctgagaatctgttgctggcc

SEQ ID NO: 912 - RNA, 20 nt, synthetic construct
  source 1..20: mol_type = other RNA
cctgagaatctgttgctggc

SEQ ID NO: 913 - RNA, 20 nt, synthetic construct
  source 1..20: mol_type = other RNA
gcctgagaatctgttgctgg

SEQ ID NO: 914 - RNA, 20 nt, synthetic construct
  source 1..20: mol_type = other RNA
tgccaagatcatcaacacaa

SEQ ID NO: 915 - RNA, 20 nt, synthetic construct
  source 1..20: mol_type = other RNA
ccaagatcatcaacacaaag

SEQ ID NO: 916 - RNA, 20 nt, synthetic construct
  source 1..20: mol_type = other RNA
gccaagatcatcaacacaaa

SEQ ID NO: 917 - RNA, 20 nt, synthetic construct
  source 1..20: mol_type = other RNA
ctgccaagatcatcaacaca

SEQ ID NO: 918 - RNA, 20 nt, synthetic construct
  source 1..20: mol_type = other RNA
gctgccaagatcatcaacac

SEQ ID NO: 919 - RNA, 20 nt, synthetic construct
  source 1..20: mol_type = other RNA
tgctgccaagatcatcaaca

SEQ ID NO: 920 - RNA, 20 nt, synthetic construct
  source 1..20: mol_type = other RNA
gcagacttcggcctagctat

SEQ ID NO: 921 - RNA, 20 nt, synthetic construct
  source 1..20: mol_type = other RNA
cagacttcggcctagctatc

SEQ ID NO: 922 - RNA, 20 nt, synthetic construct
  source 1..20: mol_type = other RNA
ggcagacttcggcctagcta

SEQ ID NO: 923 - RNA, 20 nt, synthetic construct
  source 1..20: mol_type = other RNA
tggcagacttcggcctagct

SEQ ID NO: 924 - RNA, 20 nt, synthetic construct
  source 1..20: mol_type = other RNA
ctggcagacttcggcctagc

SEQ ID NO: 925 - RNA, 20 nt, synthetic construct
  source 1..20: mol_type = other RNA
gagacctcaaggtgagtccc

SEQ ID NO: 926 - RNA, 20 nt, synthetic construct
  source 1..20: mol_type = other RNA
agagacctcaaggtgagtcc

SEQ ID NO: 927 - RNA, 20 nt, synthetic construct
  source 1..20: mol_type = other RNA
cagagacctcaaggtgagtc

SEQ ID NO: 928 - RNA, 20 nt, synthetic construct
  source 1..20: mol_type = other RNA
acagagacctcaaggtgagt

SEQ ID NO: 929 - RNA, 20 nt, synthetic construct
  source 1..20: mol_type = other RNA
cggagaacctgcttctggcc

SEQ ID NO: 930 - RNA, 20 nt, synthetic construct
  source 1..20: mol_type = other RNA
agaacctgcttctggccagc

SEQ ID NO: 931 - RNA, 20 nt, synthetic construct
  source 1..20: mol_type = other RNA
gagaacctgcttctggccag

SEQ ID NO: 932 - RNA, 20 nt, synthetic construct
  source 1..20: mol_type = other RNA
ggagaacctgcttctggcca

SEQ ID NO: 933 - RNA, 20 nt, synthetic construct
  source 1..20: mol_type = other RNA
ccggagaacctgcttctggc

SEQ ID NO: 934 - RNA, 20 nt, synthetic construct
  source 1..20: mol_type = other RNA
gccggagaacctgcttctgg

SEQ ID NO: 935 - RNA, 20 nt, synthetic construct
  source 1..20: mol_type = other RNA
agccaagatcatcaacacca

SEQ ID NO: 936 - RNA, 20 nt, synthetic construct
  source 1..20: mol_type = other RNA
ccaagatcatcaacaccaag

SEQ ID NO: 937 - RNA, 20 nt, synthetic construct
  source 1..20: mol_type = other RNA
gccaagatcatcaacaccaa

SEQ ID NO: 938 - RNA, 20 nt, synthetic construct
  source 1..20: mol_type = other RNA
cagccaagatcatcaacacc

SEQ ID NO: 939 - RNA, 20 nt, synthetic construct
  source 1..20: mol_type = other RNA
gcagccaagatcatcaacac

SEQ ID NO: 940 - RNA, 20 nt, synthetic construct
  source 1..20: mol_type = other RNA
tgcagccaagatcatcaaca

SEQ ID NO: 941 - RNA, 20 nt, synthetic construct
  source 1..20: mol_type = other RNA
gcagactttggcttagccat

SEQ ID NO: 942 - RNA, 20 nt, synthetic construct
  source 1..20: mol_type = other RNA
cagactttggcttagccata

SEQ ID NO: 943 - RNA, 20 nt, synthetic construct
  source 1..20: mol_type = other RNA
ggcagactttggcttagcca

SEQ ID NO: 944 - RNA, 20 nt, synthetic construct
  source 1..20: mol_type = other RNA
tggcagactttggcttagcc

SEQ ID NO: 945 - RNA, 20 nt, synthetic construct
  source 1..20: mol_type = other RNA
ttggcagactttggcttagc

SEQ ID NO: 946 - RNA, 20 nt, synthetic construct
  source 1..20: mol_type = other RNA
gggacctgaaggtcagtata

SEQ ID NO: 947 - RNA, 20 nt, synthetic construct
  source 1..20: mol_type = other RNA
agggacctgaaggtcagtat

SEQ ID NO: 948 - RNA, 20 nt, synthetic construct
  source 1..20: mol_type = other RNA
cagggacctgaaggtcagta

SEQ ID NO: 949 - RNA, 20 nt, synthetic construct
  source 1..20: mol_type = other RNA
acagggacctgaaggtcagt

SEQ ID NO: 950 - RNA, 20 nt, synthetic construct
  source 1..20: mol_type = other RNA
cacagggacctgaaggtcag

SEQ ID NO: 951 - RNA, 20 nt, synthetic construct
  source 1..20: mol_type = other RNA
caaaattatcaacaccaaaa

SEQ ID NO: 952 - RNA, 20 nt, synthetic construct
  source 1..20: mol_type = other RNA
ccaaaattatcaacaccaaa

SEQ ID NO: 953 - RNA, 20 nt, synthetic construct
  source 1..20: mol_type = other RNA
gccaaaattatcaacaccaa

SEQ ID NO: 954 - RNA, 20 nt, synthetic construct
  source 1..20: mol_type = other RNA
tgccaaaattatcaacacca

SEQ ID NO: 955 - RNA, 20 nt, synthetic construct
  source 1..20: mol_type = other RNA
ctgccaaaattatcaacacc

SEQ ID NO: 956 - RNA, 20 nt, synthetic construct
  source 1..20: mol_type = other RNA
gctgccaaaattatcaacac

SEQ ID NO: 957 - RNA, 20 nt, synthetic construct
  source 1..20: mol_type = other RNA
tgctgccaaaattatcaaca

SEQ ID NO: 958 - RNA, 20 nt, synthetic construct
  source 1..20: mol_type = other RNA
gggacctgaaggtactaccc

SEQ ID NO: 959 - RNA, 20 nt, synthetic construct
  source 1..20: mol_type = other RNA
agggacctgaaggtactacc

SEQ ID NO: 960 - RNA, 20 nt, synthetic construct
  source 1..20: mol_type = other RNA
cagggacctgaaggtactac

SEQ ID NO: 961 - RNA, 20 nt, synthetic construct
  source 1..20: mol_type = other RNA
acagggacctgaaggtacta

SEQ ID NO: 962 - RNA, 20 nt, synthetic construct
  source 1..20: mol_type = other RNA
cacagggacctgaaggtact

SEQ ID NO: 963 - RNA, 20 nt, synthetic construct
  source 1..20: mol_type = other RNA
ctgagaacctgctgctggcg

SEQ ID NO: 964 - RNA, 20 nt, synthetic construct
  source 1..20: mol_type = other RNA
gcctgagaacctgctgctgg

SEQ ID NO: 965 - RNA, 20 nt, synthetic construct
  source 1..20: mol_type = other RNA
agaacctgctgctggcgagt

SEQ ID NO: 966 - RNA, 20 nt, synthetic construct
  source 1..20: mol_type = other RNA
gagaacctgctgctggcgag

SEQ ID NO: 967 - RNA, 20 nt, synthetic construct
  source 1..20: mol_type = other RNA
tgagaacctgctgctggcga

SEQ ID NO: 968 - RNA, 20 nt, synthetic construct
  source 1..20: mol_type = other RNA
cctgagaacctgctgctggc

SEQ ID NO: 969 - RNA, 20 nt, synthetic construct
  source 1..20: mol_type = other RNA
catcgtgatctcaaaccaga

SEQ ID NO: 970 - RNA, 20 nt, synthetic construct
  source 1..20: mol_type = other RNA
atcgtgatctcaaaccagag

SEQ ID NO: 971 - RNA, 20 nt, synthetic construct
  source 1..20: mol_type = other RNA
tcgtgatctcaaaccagaga

SEQ ID NO: 972 - RNA, 20 nt, synthetic construct
  source 1..20: mol_type = other RNA
cgtgatctcaaaccagagaa

SEQ ID NO: 973 - RNA, 20 nt, synthetic construct
  source 1..20: mol_type = other RNA
gtgatctcaaaccagagaat

SEQ ID NO: 974 - RNA, 20 nt, synthetic construct
  source 1..20: mol_type = other RNA
accagagaatcttctttatg

SEQ ID NO: 975 - RNA, 20 nt, synthetic construct
  source 1..20: mol_type = other RNA
ccagagaatcttctttatgc

SEQ ID NO: 976 - RNA, 20 nt, synthetic construct
  source 1..20: mol_type = other RNA
cagagaatcttctttatgca

SEQ ID NO: 977 - RNA, 20 nt, synthetic construct
  source 1..20: mol_type = other RNA
agagaatcttctttatgcaa

SEQ ID NO: 978 - RNA, 20 nt, synthetic construct
  source 1..20: mol_type = other RNA
gagaatcttctttatgcaac

SEQ ID NO: 979 - RNA, 20 nt, synthetic construct
  source 1..20: mol_type = other RNA
agaatcttctttatgcaact

SEQ ID NO: 980 - RNA, 20 nt, synthetic construct
  source 1..20: mol_type = other RNA
ctcaaagtgttaaagaaaac

SEQ ID NO: 981 - RNA, 20 nt, synthetic construct
  source 1..20: mol_type = other RNA
tgctctcaaagtgttaaaga

SEQ ID NO: 982 - RNA, 20 nt, synthetic construct
  source 1..20: mol_type = other RNA
gctctcaaagtgttaaagaa

SEQ ID NO: 983 - RNA, 20 nt, synthetic construct
  source 1..20: mol_type = other RNA
ctctcaaagtgttaaagaaa

SEQ ID NO: 984 - RNA, 20 nt, synthetic construct
  source 1..20: mol_type = other RNA
tctcaaagtgttaaagaaaa

SEQ ID NO: 985 - RNA, 20 nt, synthetic construct
  source 1..20: mol_type = other RNA
tcaaagtgttaaagaaaaca

SEQ ID NO: 986 - RNA, 20 nt, synthetic construct
  source 1..20: mol_type = other RNA
caaagtgttaaagaaaacag

SEQ ID NO: 987 - RNA, 20 nt, synthetic construct
  source 1..20: mol_type = other RNA
ccgactttggcgtcagcaac

SEQ ID NO: 988 - RNA, 20 nt, synthetic construct
  source 1..20: mol_type = other RNA
gccgactttggcgtcagcaa

SEQ ID NO: 989 - RNA, 20 nt, synthetic construct
  source 1..20: mol_type = other RNA
cgccgactttggcgtcagca

SEQ ID NO: 990 - RNA, 20 nt, synthetic construct
  source 1..20: mol_type = other RNA
tcgccgactttggcgtcagc

SEQ ID NO: 991 - RNA, 20 nt, synthetic construct
  source 1..20: mol_type = other RNA
atcgccgactttggcgtcag

SEQ ID NO: 992 - RNA, 20 nt, synthetic construct
  source 1..20: mol_type = other RNA
gggacatcaagccatccaac

SEQ ID NO: 993 - RNA, 20 nt, synthetic construct
  source 1..20: mol_type = other RNA
agggacatcaagccatccaa

SEQ ID NO: 994 - RNA, 20 nt, synthetic construct
  source 1..20: mol_type = other RNA
cagggacatcaagccatcca

SEQ ID NO: 995 - RNA, 20 nt, synthetic construct
  source 1..20: mol_type = other RNA
acagggacatcaagccatcc

SEQ ID NO: 996 - RNA, 20 nt, synthetic construct
  source 1..20: mol_type = other RNA
cacagggacatcaagccatc

SEQ ID NO: 997 - RNA, 20 nt, synthetic construct
  source 1..20: mol_type = other RNA
ccatccaacctgctcctggg

SEQ ID NO: 998 - RNA, 20 nt, synthetic construct
  source 1..20: mol_type = other RNA
gccatccaacctgctcctgg

SEQ ID NO: 999 - RNA, 20 nt, synthetic construct
  source 1..20: mol_type = other RNA
catccaacctgctcctgggg

SEQ ID NO: 1000 - RNA, 20 nt, synthetic construct
  source 1..20: mol_type = other RNA
aatgaaagtcctttccaaaa

SEQ ID NO: 1001 - RNA, 20 nt, synthetic construct
  source 1..20: mol_type = other RNA
caatgaaagtcctttccaaa

SEQ ID NO: 1002 - RNA, 20 nt, synthetic construct
  source 1..20: mol_type = other RNA
gcaatgaaagtcctttccaa

SEQ ID NO: 1003 - RNA, 20 nt, synthetic construct
  source 1..20: mol_type = other RNA
ggcaatgaaagtcctttcca

SEQ ID NO: 1004 - RNA, 20 nt, synthetic construct
  source 1..20: mol_type = other RNA
gctgactttggtgtgagcaa

SEQ ID NO: 1005 - RNA, 20 nt, synthetic construct
  source 1..20: mol_type = other RNA
ctgactttggtgtgagcaat

SEQ ID NO: 1006 - RNA, 20 nt, synthetic construct
  source 1..20: mol_type = other RNA
cgctgactttggtgtgagca

SEQ ID NO: 1007 - RNA, 20 nt, synthetic construct
  source 1..20: mol_type = other RNA
tcgctgactttggtgtgagc

SEQ ID NO: 1008 - RNA, 20 nt, synthetic construct
  source 1..20: mol_type = other RNA
atcgctgactttggtgtgag

SEQ ID NO: 1009 - RNA, 20 nt, synthetic construct
  source 1..20: mol_type = other RNA
gtgacatcaaaccttccaac

SEQ ID NO: 1010 - RNA, 20 nt, synthetic construct
  source 1..20: mol_type = other RNA
cgtgacatcaaaccttccaa

SEQ ID NO: 1011 - RNA, 20 nt, synthetic construct
  source 1..20: mol_type = other RNA
ccgtgacatcaaaccttcca

SEQ ID NO: 1012 - RNA, 20 nt, synthetic construct
  source 1..20: mol_type = other RNA
accgtgacatcaaaccttcc

SEQ ID NO: 1013 - RNA, 20 nt, synthetic construct
  source 1..20: mol_type = other RNA
caccgtgacatcaaaccttc

SEQ ID NO: 1014 - RNA, 20 nt, synthetic construct
  source 1..20: mol_type = other RNA
tccaacctcctggtcggaga

SEQ ID NO: 1015 - RNA, 20 nt, synthetic construct
  source 1..20: mol_type = other RNA
ccttccaacctcctggtcgg

SEQ ID NO: 1016 - RNA, 20 nt, synthetic construct
  source 1..20: mol_type = other RNA
ccaacctcctggtcggagaa

SEQ ID NO: 1017 - RNA, 20 nt, synthetic construct
  source 1..20: mol_type = other RNA
ttccaacctcctggtcggag

SEQ ID NO: 1018 - RNA, 20 nt, synthetic construct
  source 1..20: mol_type = other RNA
cttccaacctcctggtcgga

SEQ ID NO: 1019 - RNA, 20 nt, synthetic construct
  source 1..20: mol_type = other RNA
accttccaacctcctggtcg

SEQ ID NO: 1020 - RNA, 20 nt, synthetic construct
  source 1..20: mol_type = other RNA
aatgaaggtgctgtccaaaa

SEQ ID NO: 1021 - RNA, 20 nt, synthetic construct
  source 1..20: mol_type = other RNA
caatgaaggtgctgtccaaa

SEQ ID NO: 1022 - RNA, 20 nt, synthetic construct
  source 1..20: mol_type = other RNA
gcaatgaaggtgctgtccaa

SEQ ID NO: 1023 - RNA, 20 nt, synthetic construct
  source 1..20: mol_type = other RNA
ggcaatgaaggtgctgtcca

SEQ ID NO: 1024 - RNA, 20 nt, synthetic construct
  source 1..20: mol_type = other RNA
cagtgacttccatctggcta

SEQ ID NO: 1025 - RNA, 20 nt, synthetic construct
  source 1..20: mol_type = other RNA
gtgacttccatctggctaag

SEQ ID NO: 1026 - RNA, 20 nt, synthetic construct
  source 1..20: mol_type = other RNA
agtgacttccatctggctaa

SEQ ID NO: 1027 - RNA, 20 nt, synthetic construct
  source 1..20: mol_type = other RNA
tcagtgacttccatctggct

SEQ ID NO: 1028 - RNA, 20 nt, synthetic construct
  source 1..20: mol_type = other RNA
atcagtgacttccatctggc

SEQ ID NO: 1029 - RNA, 20 nt, synthetic construct
  source 1..20: mol_type = other RNA
agaacctggtttactacaac

SEQ ID NO: 1030 - RNA, 20 nt, synthetic construct
  source 1..20: mol_type = other RNA
gagaacctggtttactacaa

SEQ ID NO: 1031 - RNA, 20 nt, synthetic construct
  source 1..20: mol_type = other RNA
ggagaacctggtttactaca

SEQ ID NO: 1032 - RNA, 20 nt, synthetic construct
  source 1..20: mol_type = other RNA
tggagaacctggtttactac

SEQ ID NO: 1033 - RNA, 20 nt, synthetic construct
  source 1..20: mol_type = other RNA
ctggagaacctggtttacta

SEQ ID NO: 1034 - RNA, 20 nt, synthetic construct
  source 1..20: mol_type = other RNA
gctggagaacctggtttact

SEQ ID NO: 1035 - RNA, 20 nt, synthetic construct
  source 1..20: mol_type = other RNA
tgcaagaagttccagaagcg

SEQ ID NO: 1036 - RNA, 20 nt, synthetic construct
  source 1..20: mol_type = other RNA
ctgcaagaagttccagaagc

SEQ ID NO: 1037 - RNA, 20 nt, synthetic construct
  source 1..20: mol_type = other RNA
cctgcaagaagttccagaag

SEQ ID NO: 1038 - RNA, 20 nt, synthetic construct
  source 1..20: mol_type = other RNA
cacctgcaagaagttccaga

SEQ ID NO: 1039 - RNA, 20 nt, synthetic construct
  source 1..20: mol_type = other RNA
gcaagaagttccagaagcgg

SEQ ID NO: 1040 - RNA, 20 nt, synthetic construct
  source 1..20: mol_type = other RNA
acctgcaagaagttccagaa

SEQ ID NO: 1041 - RNA, 20 nt, synthetic construct
  source 1..20: mol_type = other RNA
gggatgtgaaggtaagtcat

SEQ ID NO: 1042 - RNA, 20 nt, synthetic construct
  source 1..20: mol_type = other RNA
agggatgtgaaggtaagtca

SEQ ID NO: 1043 - RNA, 20 nt, synthetic construct
  source 1..20: mol_type = other RNA
cagggatgtgaaggtaagtc

SEQ ID NO: 1044 - RNA, 20 nt, synthetic construct
  source 1..20: mol_type = other RNA
acagggatgtgaaggtaagt

SEQ ID NO: 1045 - RNA, 20 nt, synthetic construct
  source 1..20: mol_type = other RNA
cacagggatgtgaaggtaag

SEQ ID NO: 1046 - RNA, 20 nt, synthetic construct
  source 1..20: mol_type = other RNA
tcagagacattaaacctgac

SEQ ID NO: 1047 - RNA, 20 nt, synthetic construct
  source 1..20: mol_type = other RNA
ttcagagacattaaacctga

SEQ ID NO: 1048 - RNA, 20 nt, synthetic construct
  source 1..20: mol_type = other RNA
gagacattaaacctgacaat

SEQ ID NO: 1049 - RNA, 20 nt, synthetic construct
  source 1..20: mol_type = other RNA
agagacattaaacctgacaa

SEQ ID NO: 1050 - RNA, 20 nt, synthetic construct
  source 1..20: mol_type = other RNA
cagagacattaaacctgaca

SEQ ID NO: 1051 - RNA, 20 nt, synthetic construct
  source 1..20: mol_type = other RNA
tgacaatatactgatggata

SEQ ID NO: 1052 - RNA, 20 nt, synthetic construct
  source 1..20: mol_type = other RNA
acaatatactgatggatatg

SEQ ID NO: 1053 - RNA, 20 nt, synthetic construct
  source 1..20: mol_type = other RNA
gacaatatactgatggatat

SEQ ID NO: 1054 - RNA, 20 nt, synthetic construct
  source 1..20: mol_type = other RNA
ctgacaatatactgatggat

SEQ ID NO: 1055 - RNA, 20 nt, synthetic construct
  source 1..20: mol_type = other RNA
cctgacaatatactgatgga

SEQ ID NO: 1056 - RNA, 20 nt, synthetic construct
  source 1..20: mol_type = other RNA
acctgacaatatactgatgg

SEQ ID NO: 1057 - RNA, 20 nt, synthetic construct
  source 1..20: mol_type = other RNA
atgaaaatattgaataaatg

SEQ ID NO: 1058 - RNA, 20 nt, synthetic construct
  source 1..20: mol_type = other RNA
catgaaaatattgaataaat

SEQ ID NO: 1059 - RNA, 20 nt, synthetic construct
  source 1..20: mol_type = other RNA
ccatgaaaatattgaataaa

SEQ ID NO: 1060 - RNA, 20 nt, synthetic construct
  source 1..20: mol_type = other RNA
gaaaatattgaataaatggg

SEQ ID NO: 1061 - RNA, 20 nt, synthetic construct
  source 1..20: mol_type = other RNA
tgaaaatattgaataaatgg

SEQ ID NO: 1062 - RNA, 20 nt, synthetic construct
  source 1..20: mol_type = other RNA
gccatgaaaatattgaataa

SEQ ID NO: 1063 - RNA, 20 nt, synthetic construct
  source 1..20: mol_type = other RNA
tgccatgaaaatattgaata

SEQ ID NO: 1064 - RNA, 20 nt, synthetic construct
  source 1..20: mol_type = other RNA
ggctgactttggatcatgtt

SEQ ID NO: 1065 - RNA, 20 nt, synthetic construct
  source 1..20: mol_type = other RNA
ctgactttggatcatgtttg

SEQ ID NO: 1066 - RNA, 20 nt, synthetic construct
  source 1..20: mol_type = other RNA
gctgactttggatcatgttt

SEQ ID NO: 1067 - RNA, 20 nt, synthetic construct
  source 1..20: mol_type = other RNA
tggctgactttggatcatgt

SEQ ID NO: 1068 - RNA, 20 nt, synthetic construct
  source 1..20: mol_type = other RNA
ctggctgactttggatcatg

SEQ ID NO: 1069 - RNA, 20 nt, synthetic construct
  source 1..20: mol_type = other RNA
acagagacattaaacctgac

SEQ ID NO: 1070 - RNA, 20 nt, synthetic construct
  source 1..20: mol_type = other RNA
aacagagacattaaacctga

SEQ ID NO: 1071 - RNA, 20 nt, synthetic construct
  source 1..20: mol_type = other RNA
gaaaatcctcaacaagtggg

SEQ ID NO: 1072 - RNA, 20 nt, synthetic construct
  source 1..20: mol_type = other RNA
atgaaaatcctcaacaagtg

SEQ ID NO: 1073 - RNA, 20 nt, synthetic construct
  source 1..20: mol_type = other RNA
aatgaaaatcctcaacaagt

SEQ ID NO: 1074 - RNA, 20 nt, synthetic construct
  source 1..20: mol_type = other RNA
caatgaaaatcctcaacaag

SEQ ID NO: 1075 - RNA, 20 nt, synthetic construct
  source 1..20: mol_type = other RNA
tgcaatgaaaatcctcaaca

SEQ ID NO: 1076 - RNA, 20 nt, synthetic construct
  source 1..20: mol_type = other RNA
tgaaaatcctcaacaagtgg

SEQ ID NO: 1077 - RNA, 20 nt, synthetic construct
  source 1..20: mol_type = other RNA
gcaatgaaaatcctcaacaa

SEQ ID NO: 1078 - RNA, 20 nt, synthetic construct
  source 1..20: mol_type = other RNA
ctgacttcggctcctgcctg

SEQ ID NO: 1079 - RNA, 20 nt, synthetic construct
  source 1..20: mol_type = other RNA
ggctgacttcggctcctgcc

SEQ ID NO: 1080 - RNA, 20 nt, synthetic construct
  source 1..20: mol_type = other RNA
gctgacttcggctcctgcct

SEQ ID NO: 1081 - RNA, 20 nt, synthetic construct
  source 1..20: mol_type = other RNA
tggctgacttcggctcctgc

SEQ ID NO: 1082 - RNA, 20 nt, synthetic construct
  source 1..20: mol_type = other RNA
ctggctgacttcggctcctg

SEQ ID NO: 1083 - RNA, 20 nt, synthetic construct
  source 1..20: mol_type = other RNA
agggatgtcaagccagacaa

SEQ ID NO: 1084 - RNA, 20 nt, synthetic construct
  source 1..20: mol_type = other RNA
gggatgtcaagccagacaac

SEQ ID NO: 1085 - RNA, 20 nt, synthetic construct
  source 1..20: mol_type = other RNA
cagggatgtcaagccagaca

SEQ ID NO: 1086 - RNA, 20 nt, synthetic construct
  source 1..20: mol_type = other RNA
ccagggatgtcaagccagac

SEQ ID NO: 1087 - RNA, 20 nt, synthetic construct
  source 1..20: mol_type = other RNA
cccagggatgtcaagccaga

SEQ ID NO: 1088 - RNA, 20 nt, synthetic construct
  source 1..20: mol_type = other RNA
agacaacgtcctgctggatg

SEQ ID NO: 1089 - RNA, 20 nt, synthetic construct
  source 1..20: mol_type = other RNA
ccagacaacgtcctgctgga

SEQ ID NO: 1090 - RNA, 20 nt, synthetic construct
  source 1..20: mol_type = other RNA
acaacgtcctgctggatgtg

SEQ ID NO: 1091 - RNA, 20 nt, synthetic construct
  source 1..20: mol_type = other RNA
gacaacgtcctgctggatgt

SEQ ID NO: 1092 - RNA, 20 nt, synthetic construct
  source 1..20: mol_type = other RNA
cagacaacgtcctgctggat

SEQ ID NO: 1093 - RNA, 20 nt, synthetic construct
  source 1..20: mol_type = other RNA
gccagacaacgtcctgctgg

SEQ ID NO: 1094 - RNA, 20 nt, synthetic construct
  source 1..20: mol_type = other RNA
gaaaatgctgcacaagtggg

SEQ ID NO: 1095 - RNA, 20 nt, synthetic construct
  source 1..20: mol_type = other RNA
atgaaaatgctgcacaagtg

SEQ ID NO: 1096 - RNA, 20 nt, synthetic construct
  source 1..20: mol_type = other RNA
catgaaaatgctgcacaagt

SEQ ID NO: 1097 - RNA, 20 nt, synthetic construct
  source 1..20: mol_type = other RNA
ccatgaaaatgctgcacaag

SEQ ID NO: 1098 - RNA, 20 nt, synthetic construct
  source 1..20: mol_type = other RNA
tgccatgaaaatgctgcaca

SEQ ID NO: 1099 - RNA, 20 nt, synthetic construct
  source 1..20: mol_type = other RNA
tgaaaatgctgcacaagtgg

SEQ ID NO: 1100 - RNA, 20 nt, synthetic construct
  source 1..20: mol_type = other RNA
gccatgaaaatgctgcacaa

SEQ ID NO: 1101 - RNA, 20 nt, synthetic construct
  source 1..20: mol_type = other RNA
gtagactttggtttggccca

SEQ ID NO: 1102 - RNA, 20 nt, synthetic construct
  source 1..20: mol_type = other RNA
tagactttggtttggcccaa

SEQ ID NO: 1103 - RNA, 20 nt, synthetic construct
  source 1..20: mol_type = other RNA
ttggtagactttggtttggc

SEQ ID NO: 1104 - RNA, 20 nt, synthetic construct
  source 1..20: mol_type = other RNA
tggtagactttggtttggcc

SEQ ID NO: 1105 - RNA, 20 nt, synthetic construct
  source 1..20: mol_type = other RNA
ggtagactttggtttggccc

SEQ ID NO: 1106 - RNA, 20 nt, synthetic construct
  source 1..20: mol_type = other RNA
caccgtgatgttaagcccag

SEQ ID NO: 1107 - RNA, 20 nt, synthetic construct
  source 1..20: mol_type = other RNA
accgtgatgttaagcccagc

SEQ ID NO: 1108 - RNA, 20 nt, synthetic construct
  source 1..20: mol_type = other RNA
ccgtgatgttaagcccagca

SEQ ID NO: 1109 - RNA, 20 nt, synthetic construct
  source 1..20: mol_type = other RNA
cgtgatgttaagcccagcaa

SEQ ID NO: 1110 - RNA, 20 nt, synthetic construct
  source 1..20: mol_type = other RNA
gtgatgttaagcccagcaat

SEQ ID NO: 1111 - RNA, 20 nt, synthetic construct
  source 1..20: mol_type = other RNA
taaaacacttgattccaaca

SEQ ID NO: 1112 - RNA, 20 nt, synthetic construct
  source 1..20: mol_type = other RNA
tgctctaaaacacttgattc

SEQ ID NO: 1113 - RNA, 20 nt, synthetic construct
  source 1..20: mol_type = other RNA
gctctaaaacacttgattcc

SEQ ID NO: 1114 - RNA, 20 nt, synthetic construct
  source 1..20: mol_type = other RNA
ctctaaaacacttgattcca

SEQ ID NO: 1115 - RNA, 20 nt, synthetic construct
  source 1..20: mol_type = other RNA
tctaaaacacttgattccaa

SEQ ID NO: 1116 - RNA, 20 nt, synthetic construct
  source 1..20: mol_type = other RNA
ctaaaacacttgattccaac

SEQ ID NO: 1117 - RNA, 20 nt, synthetic construct
  source 1..20: mol_type = other RNA
aaaacacttgattccaacaa

SEQ ID NO: 1118 - RNA, 20 nt, synthetic construct
  source 1..20: mol_type = other RNA
cacagagacttaaaacctca

SEQ ID NO: 1119 - RNA, 20 nt, synthetic construct
  source 1..20: mol_type = other RNA
acagagacttaaaacctcaa

SEQ ID NO: 1120 - RNA, 20 nt, synthetic construct
  source 1..20: mol_type = other RNA
cagagacttaaaacctcaaa

SEQ ID NO: 1121 - RNA, 20 nt, synthetic construct
  source 1..20: mol_type = other RNA
agagacttaaaacctcaaaa

SEQ ID NO: 1122 - RNA, 20 nt, synthetic construct
  source 1..20: mol_type = other RNA
gagacttaaaacctcaaaat

SEQ ID NO: 1123 - RNA, 20 nt, synthetic construct
  source 1..20: mol_type = other RNA
cctcaaaatctcttgattga

SEQ ID NO: 1124 - RNA, 20 nt, synthetic construct
  source 1..20: mol_type = other RNA
acctcaaaatctcttgattg

SEQ ID NO: 1125 - RNA, 20 nt, synthetic construct
  source 1..20: mol_type = other RNA
ctcaaaatctcttgattgat

SEQ ID NO: 1126 - RNA, 20 nt, synthetic construct
  source 1..20: mol_type = other RNA
tcaaaatctcttgattgatg

SEQ ID NO: 1127 - RNA, 20 nt, synthetic construct
  source 1..20: mol_type = other RNA
caaaatctcttgattgatga

SEQ ID NO: 1128 - RNA, 20 nt, synthetic construct
  source 1..20: mol_type = other RNA
aaaatctcttgattgatgac

SEQ ID NO: 1129 - RNA, 20 nt, synthetic construct
  source 1..20: mol_type = other RNA
cagcggatttcggcctggcc

SEQ ID NO: 1130 - RNA, 20 nt, synthetic construct
  source 1..20: mol_type = other RNA
agcggatttcggcctggccc

SEQ ID NO: 1131 - RNA, 20 nt, synthetic construct
  source 1..20: mol_type = other RNA
gcggatttcggcctggcccg

SEQ ID NO: 1132 - RNA, 20 nt, synthetic construct
  source 1..20: mol_type = other RNA
gcagcggatttcggcctggc

SEQ ID NO: 1133 - RNA, 20 nt, synthetic construct
  source 1..20: mol_type = other RNA
cggatttcggcctggcccgg

SEQ ID NO: 1134 - RNA, 20 nt, synthetic construct
  source 1..20: mol_type = other RNA
cacagggacctgaaggtttc

SEQ ID NO: 1135 - RNA, 20 nt, synthetic construct
  source 1..20: mol_type = other RNA
acagggacctgaaggtttcc

SEQ ID NO: 1136 - RNA, 20 nt, synthetic construct
  source 1..20: mol_type = other RNA
cagggacctgaaggtttcca

SEQ ID NO: 1137 - RNA, 20 nt, synthetic construct
  source 1..20: mol_type = other RNA
agggacctgaaggtttccaa

SEQ ID NO: 1138 - RNA, 20 nt, synthetic construct
  source 1..20: mol_type = other RNA
gggacctgaaggtttccaac

SEQ ID NO: 1139 - RNA, 20 nt, synthetic construct
  source 1..20: mol_type = other RNA
gtttccaacttgctcatgac

SEQ ID NO: 1140 - RNA, 20 nt, synthetic construct
  source 1..20: mol_type = other RNA
ggtttccaacttgctcatga

SEQ ID NO: 1141 - RNA, 20 nt, synthetic construct
  source 1..20: mol_type = other RNA
tttccaacttgctcatgacc

SEQ ID NO: 1142 - RNA, 20 nt, synthetic construct
  source 1..20: mol_type = other RNA
ttccaacttgctcatgaccg

SEQ ID NO: 1143 - RNA, 20 nt, synthetic construct
  source 1..20: mol_type = other RNA
tccaacttgctcatgaccga

SEQ ID NO: 1144 - RNA, 20 nt, synthetic construct
  source 1..20: mol_type = other RNA
ccaacttgctcatgaccgac

SEQ ID NO: 1145 - RNA, 20 nt, synthetic construct
  source 1..20: mol_type = other RNA
cgcactgaagaaggtgcgga

SEQ ID NO: 1146 - RNA, 20 nt, synthetic construct
  source 1..20: mol_type = other RNA
gcactgaagaaggtgcggat

SEQ ID NO: 1147 - RNA, 20 nt, synthetic construct
  source 1..20: mol_type = other RNA
cactgaagaaggtgcggatg

SEQ ID NO: 1148 - RNA, 20 nt, synthetic construct
  source 1..20: mol_type = other RNA
actgaagaaggtgcggatgg

SEQ ID NO: 1149 - RNA, 20 nt, synthetic construct
  source 1..20: mol_type = other RNA
ctgaagaaggtgcggatgga

SEQ ID NO: 1150 - RNA, 20 nt, synthetic construct
  source 1..20: mol_type = other RNA
tgaagaaggtgcggatggac

SEQ ID NO: 1151 - RNA, 20 nt, synthetic construct
  source 1..20: mol_type = other RNA
gtgacctcaagacgtccaac

SEQ ID NO: 1152 - RNA, 20 nt, synthetic construct
  source 1..20: mol_type = other RNA
cgtgacctcaagacgtccaa

SEQ ID NO: 1153 - RNA, 20 nt, synthetic construct
  source 1..20: mol_type = other RNA
ccgtgacctcaagacgtcca

SEQ ID NO: 1154 - RNA, 20 nt, synthetic construct
  source 1..20: mol_type = other RNA
accgtgacctcaagacgtcc

SEQ ID NO: 1155 - RNA, 20 nt, synthetic construct
  source 1..20: mol_type = other RNA
caccgtgacctcaagacgtc

SEQ ID NO: 1156 - RNA, 20 nt, synthetic construct
  source 1..20: mol_type = other RNA
tccaacctgctgctgagcca

SEQ ID NO: 1157 - RNA, 20 nt, synthetic construct
  source 1..20: mol_type = other RNA
ccaacctgctgctgagccac

SEQ ID NO: 1158 - RNA, 20 nt, synthetic construct
  source 1..20: mol_type = other RNA
gtccaacctgctgctgagcc

SEQ ID NO: 1159 - RNA, 20 nt, synthetic construct
  source 1..20: mol_type = other RNA
cgtccaacctgctgctgagc

SEQ ID NO: 1160 - RNA, 20 nt, synthetic construct
  source 1..20: mol_type = other RNA
acgtccaacctgctgctgag

SEQ ID NO: 1161 - RNA, 20 nt, synthetic construct
  source 1..20: mol_type = other RNA
gacgtccaacctgctgctga

SEQ ID NO: 1162 - RNA, 20 nt, synthetic construct
  source 1..20: mol_type = other RNA
tctaaagcggctgaagatgg

SEQ ID NO: 1163 - RNA, 20 nt, synthetic construct
  source 1..20: mol_type = other RNA
gctctaaagcggctgaagat

SEQ ID NO: 1164 - RNA, 20 nt, synthetic construct
  source 1..20: mol_type = other RNA
ggctctaaagcggctgaaga

SEQ ID NO: 1165 - RNA, 20 nt, synthetic construct
  source 1..20: mol_type = other RNA
taaagcggctgaagatggag

SEQ ID NO: 1166 - RNA, 20 nt, synthetic construct
  source 1..20: mol_type = other RNA
ctaaagcggctgaagatgga

SEQ ID NO: 1167 - RNA, 20 nt, synthetic construct
  source 1..20: mol_type = other RNA
ctctaaagcggctgaagatg

SEQ ID NO: 1168 - RNA, 20 nt, synthetic construct
  source 1..20: mol_type = other RNA
ggtgacttcgggctggcgcg

SEQ ID NO: 1169 - RNA, 20 nt, synthetic construct
  source 1..20: mol_type = other RNA
gggtgacttcgggctggcgc

SEQ ID NO: 1170 - RNA, 20 nt, synthetic construct
  source 1..20: mol_type = other RNA
tgggtgacttcgggctggcg

SEQ ID NO: 1171 - RNA, 20 nt, synthetic construct
  source 1..20: mol_type = other RNA
gtgacttcgggctggcgcgg

SEQ ID NO: 1172 - RNA, 20 nt, synthetic construct
  source 1..20: mol_type = other RNA
catcgggatattaagtgttc

SEQ ID NO: 1173 - RNA, 20 nt, synthetic construct
  source 1..20: mol_type = other RNA
atcgggatattaagtgttct

SEQ ID NO: 1174 - RNA, 20 nt, synthetic construct
  source 1..20: mol_type = other RNA
tcgggatattaagtgttcta

SEQ ID NO: 1175 - RNA, 20 nt, synthetic construct
  source 1..20: mol_type = other RNA
cgggatattaagtgttctaa

SEQ ID NO: 1176 - RNA, 20 nt, synthetic construct
  source 1..20: mol_type = other RNA
gggatattaagtgttctaac

SEQ ID NO: 1177 - RNA, 20 nt, synthetic construct
  source 1..20: mol_type = other RNA
gctctgaagaaggtgagact

SEQ ID NO: 1178 - RNA, 20 nt, synthetic construct
  source 1..20: mol_type = other RNA
ggctctgaagaaggtgagac

SEQ ID NO: 1179 - RNA, 20 nt, synthetic construct
  source 1..20: mol_type = other RNA
ctctgaagaaggtgagacta

SEQ ID NO: 1180 - RNA, 20 nt, synthetic construct
  source 1..20: mol_type = other RNA
tctgaagaaggtgagactag

SEQ ID NO: 1181 - RNA, 20 nt, synthetic construct
  source 1..20: mol_type = other RNA
ctgaagaaggtgagactaga

SEQ ID NO: 1182 - RNA, 20 nt, synthetic construct
  source 1..20: mol_type = other RNA
tgaagaaggtgagactagac

SEQ ID NO: 1183 - RNA, 20 nt, synthetic construct
  source 1..20: mol_type = other RNA
ttgcagactttggacttgct

SEQ ID NO: 1184 - RNA, 20 nt, synthetic construct
  source 1..20: mol_type = other RNA
cttgcagactttggacttgc

SEQ ID NO: 1185 - RNA, 20 nt, synthetic construct
  source 1..20: mol_type = other RNA
tgcagactttggacttgctc

SEQ ID NO: 1186 - RNA, 20 nt, synthetic construct
  source 1..20: mol_type = other RNA
gcagactttggacttgctcg

SEQ ID NO: 1187 - RNA, 20 nt, synthetic construct
  source 1..20: mol_type = other RNA
cagactttggacttgctcga

SEQ ID NO: 1188 - RNA, 20 nt, synthetic construct
  source 1..20: mol_type = other RNA
catagagatattaaatgttc

SEQ ID NO: 1189 - RNA, 20 nt, synthetic construct
  source 1..20: mol_type = other RNA
atagagatattaaatgttcc

SEQ ID NO: 1190 - RNA, 20 nt, synthetic construct
  source 1..20: mol_type = other RNA
tagagatattaaatgttcca

SEQ ID NO: 1191 - RNA, 20 nt, synthetic construct
  source 1..20: mol_type = other RNA
agagatattaaatgttccaa

SEQ ID NO: 1192 - RNA, 20 nt, synthetic construct
  source 1..20: mol_type = other RNA
gagatattaaatgttccaat

SEQ ID NO: 1193 - RNA, 20 nt, synthetic construct
  source 1..20: mol_type = other RNA
ccaatatccttctaaataat

SEQ ID NO: 1194 - RNA, 20 nt, synthetic construct
  source 1..20: mol_type = other RNA
atgttccaatatccttctaa

SEQ ID NO: 1195 - RNA, 20 nt, synthetic construct
  source 1..20: mol_type = other RNA
tgttccaatatccttctaaa

SEQ ID NO: 1196 - RNA, 20 nt, synthetic construct
  source 1..20: mol_type = other RNA
gttccaatatccttctaaat

SEQ ID NO: 1197 - RNA, 20 nt, synthetic construct
  source 1..20: mol_type = other RNA
ttccaatatccttctaaata

SEQ ID NO: 1198 - RNA, 20 nt, synthetic construct
  source 1..20: mol_type = other RNA
tccaatatccttctaaataa

SEQ ID NO: 1199 - RNA, 20 nt, synthetic construct
  source 1..20: mol_type = other RNA
ctggcagatttcggtaggaa

SEQ ID NO: 1200 - RNA, 20 nt, synthetic construct
  source 1..20: mol_type = other RNA
gcagatttcggtaggaaagc

SEQ ID NO: 1201 - RNA, 20 nt, synthetic construct
  source 1..20: mol_type = other RNA
tggcagatttcggtaggaaa

SEQ ID NO: 1202 - RNA, 20 nt, synthetic construct
  source 1..20: mol_type = other RNA
ggcagatttcggtaggaaag

SEQ ID NO: 1203 - RNA, 20 nt, synthetic construct
  source 1..20: mol_type = other RNA
cagatttcggtaggaaagca

SEQ ID NO: 1204 - RNA, 20 nt, synthetic construct
  source 1..20: mol_type = other RNA
cacagagacctgaaaccaca

SEQ ID NO: 1205 - RNA, 20 nt, synthetic construct
  source 1..20: mol_type = other RNA
acagagacctgaaaccacag

SEQ ID NO: 1206 - RNA, 20 nt, synthetic construct
  source 1..20: mol_type = other RNA
cagagacctgaaaccacaga

SEQ ID NO: 1207 - RNA, 20 nt, synthetic construct
  source 1..20: mol_type = other RNA
agagacctgaaaccacagaa

SEQ ID NO: 1208 - RNA, 20 nt, synthetic construct
  source 1..20: mol_type = other RNA
gagacctgaaaccacagaac

SEQ ID NO: 1209 - RNA, 20 nt, synthetic construct
  source 1..20: mol_type = other RNA
ccacagaaccttctgatcag

SEQ ID NO: 1210 - RNA, 20 nt, synthetic construct
  source 1..20: mol_type = other RNA
accacagaaccttctgatca

SEQ ID NO: 1211 - RNA, 20 nt, synthetic construct
  source 1..20: mol_type = other RNA
cacagaaccttctgatcagt

SEQ ID NO: 1212 - RNA, 20 nt, synthetic construct
  source 1..20: mol_type = other RNA
acagaaccttctgatcagtg

SEQ ID NO: 1213 - RNA, 20 nt, synthetic construct
  source 1..20: mol_type = other RNA
cagaaccttctgatcagtga

SEQ ID NO: 1214 - RNA, 20 nt, synthetic construct
  source 1..20: mol_type = other RNA
agaaccttctgatcagtgac

SEQ ID NO: 1215 - RNA, 20 nt, synthetic construct
  source 1..20: mol_type = other RNA
agctctgaaggtgatcaggc

SEQ ID NO: 1216 - RNA, 20 nt, synthetic construct
  source 1..20: mol_type = other RNA
tctgaaggtgatcaggctgc

SEQ ID NO: 1217 - RNA, 20 nt, synthetic construct
  source 1..20: mol_type = other RNA
ctgaaggtgatcaggctgca

SEQ ID NO: 1218 - RNA, 20 nt, synthetic construct
  source 1..20: mol_type = other RNA
gctctgaaggtgatcaggct

SEQ ID NO: 1219 - RNA, 20 nt, synthetic construct
  source 1..20: mol_type = other RNA
ctctgaaggtgatcaggctg

SEQ ID NO: 1220 - RNA, 20 nt, synthetic construct
  source 1..20: mol_type = other RNA
tgaaggtgatcaggctgcag

SEQ ID NO: 1221 - RNA, 20 nt, synthetic construct
  source 1..20: mol_type = other RNA
cacagggacctgaaacctca

SEQ ID NO: 1222 - RNA, 20 nt, synthetic construct
  source 1..20: mol_type = other RNA
acagggacctgaaacctcag

SEQ ID NO: 1223 - RNA, 20 nt, synthetic construct
  source 1..20: mol_type = other RNA
cagggacctgaaacctcaga

SEQ ID NO: 1224 - RNA, 20 nt, synthetic construct
  source 1..20: mol_type = other RNA
agggacctgaaacctcagaa

SEQ ID NO: 1225 - RNA, 20 nt, synthetic construct
  source 1..20: mol_type = other RNA
gggacctgaaacctcagaac

SEQ ID NO: 1226 - RNA, 20 nt, synthetic construct
  source 1..20: mol_type = other RNA
acctcagaacttactcatca

SEQ ID NO: 1227 - RNA, 20 nt, synthetic construct
  source 1..20: mol_type = other RNA
cctcagaacttactcatcag

SEQ ID NO: 1228 - RNA, 20 nt, synthetic construct
  source 1..20: mol_type = other RNA
ctcagaacttactcatcagt

SEQ ID NO: 1229 - RNA, 20 nt, synthetic construct
  source 1..20: mol_type = other RNA
tcagaacttactcatcagtc

SEQ ID NO: 1230 - RNA, 20 nt, synthetic construct
  source 1..20: mol_type = other RNA
cagaacttactcatcagtca

SEQ ID NO: 1231 - RNA, 20 nt, synthetic construct
  source 1..20: mol_type = other RNA
agaacttactcatcagtcac

SEQ ID NO: 1232 - RNA, 20 nt, synthetic construct
  source 1..20: mol_type = other RNA
ggctttaaaagtcatcagca

SEQ ID NO: 1233 - RNA, 20 nt, synthetic construct
  source 1..20: mol_type = other RNA
ttaaaagtcatcagcatgaa

SEQ ID NO: 1234 - RNA, 20 nt, synthetic construct
  source 1..20: mol_type = other RNA
gctttaaaagtcatcagcat

SEQ ID NO: 1235 - RNA, 20 nt, synthetic construct
  source 1..20: mol_type = other RNA
ctttaaaagtcatcagcatg

SEQ ID NO: 1236 - RNA, 20 nt, synthetic construct
  source 1..20: mol_type = other RNA
tttaaaagtcatcagcatga

SEQ ID NO: 1237 - RNA, 20 nt, synthetic construct
  source 1..20: mol_type = other RNA
taaaagtcatcagcatgaat

SEQ ID NO: 1238 - RNA, 20 nt, synthetic construct
  source 1..20: mol_type = other RNA
aaaagtcatcagcatgaatg

SEQ ID NO: 1239 - RNA, 20 nt, synthetic construct
  source 1..20: mol_type = other RNA
ctggctgactttggtaccac

SEQ ID NO: 1240 - RNA, 20 nt, synthetic construct
  source 1..20: mol_type = other RNA
tggctgactttggtaccact

SEQ ID NO: 1241 - RNA, 20 nt, synthetic construct
  source 1..20: mol_type = other RNA
ggctgactttggtaccactg

SEQ ID NO: 1242 - RNA, 20 nt, synthetic construct
  source 1..20: mol_type = other RNA
gctgactttggtaccactgg

SEQ ID NO: 1243 - RNA, 20 nt, synthetic construct
  source 1..20: mol_type = other RNA
ctgactttggtaccactggc

SEQ ID NO: 1244 - RNA, 20 nt, synthetic construct
  source 1..20: mol_type = other RNA
caccgagacctcaagcccca

SEQ ID NO: 1245 - RNA, 20 nt, synthetic construct
  source 1..20: mol_type = other RNA
accgagacctcaagccccag

SEQ ID NO: 1246 - RNA, 20 nt, synthetic construct
  source 1..20: mol_type = other RNA
ccgagacctcaagccccaga

SEQ ID NO: 1247 - RNA, 20 nt, synthetic construct
  source 1..20: mol_type = other RNA
cgagacctcaagccccagaa

SEQ ID NO: 1248 - RNA, 20 nt, synthetic construct
  source 1..20: mol_type = other RNA
gagacctcaagccccagaac

SEQ ID NO: 1249 - RNA, 20 nt, synthetic construct
  source 1..20: mol_type = other RNA
ccagaacctgctcatcaacg

SEQ ID NO: 1250 - RNA, 20 nt, synthetic construct
  source 1..20: mol_type = other RNA
agaacctgctcatcaacgag

SEQ ID NO: 1251 - RNA, 20 nt, synthetic construct
  source 1..20: mol_type = other RNA
cccagaacctgctcatcaac

SEQ ID NO: 1252 - RNA, 20 nt, synthetic construct
  source 1..20: mol_type = other RNA
cagaacctgctcatcaacga

SEQ ID NO: 1253 - RNA, 20 nt, synthetic construct
  source 1..20: mol_type = other RNA
ggcactcaaggagatcagac

SEQ ID NO: 1254 - RNA, 20 nt, synthetic construct
  source 1..20: mol_type = other RNA
gcactcaaggagatcagact

SEQ ID NO: 1255 - RNA, 20 nt, synthetic construct
  source 1..20: mol_type = other RNA
cactcaaggagatcagactg

SEQ ID NO: 1256 - RNA, 20 nt, synthetic construct
  source 1..20: mol_type = other RNA
actcaaggagatcagactgg

SEQ ID NO: 1257 - RNA, 20 nt, synthetic construct
  source 1..20: mol_type = other RNA
ctcaaggagatcagactgga

SEQ ID NO: 1258 - RNA, 20 nt, synthetic construct
  source 1..20: mol_type = other RNA
tcaaggagatcagactggaa

SEQ ID NO: 1259 - RNA, 20 nt, synthetic construct
  source 1..20: mol_type = other RNA
gagacttgaaaccacagaac

SEQ ID NO: 1260 - RNA, 20 nt, synthetic construct
  source 1..20: mol_type = other RNA
cgagacttgaaaccacagaa

SEQ ID NO: 1261 - RNA, 20 nt, synthetic construct
  source 1..20: mol_type = other RNA
tcgagacttgaaaccacaga

SEQ ID NO: 1262 - RNA, 20 nt, synthetic construct
  source 1..20: mol_type = other RNA
atcgagacttgaaaccacag

SEQ ID NO: 1263 - RNA, 20 nt, synthetic construct
  source 1..20: mol_type = other RNA
catcgagacttgaaaccaca

SEQ ID NO: 1264 - RNA, 20 nt, synthetic construct
  source 1..20: mol_type = other RNA
acagaacctcctcattaatg

SEQ ID NO: 1265 - RNA, 20 nt, synthetic construct
  source 1..20: mol_type = other RNA
ccacagaacctcctcattaa

SEQ ID NO: 1266 - RNA, 20 nt, synthetic construct
  source 1..20: mol_type = other RNA
agaacctcctcattaatgag

SEQ ID NO: 1267 - RNA, 20 nt, synthetic construct
  source 1..20: mol_type = other RNA
cagaacctcctcattaatga

SEQ ID NO: 1268 - RNA, 20 nt, synthetic construct
  source 1..20: mol_type = other RNA
cacagaacctcctcattaat

SEQ ID NO: 1269 - RNA, 20 nt, synthetic construct
  source 1..20: mol_type = other RNA
accacagaacctcctcatta

SEQ ID NO: 1270 - RNA, 20 nt, synthetic construct
  source 1..20: mol_type = other RNA
gcattaaaagagatccgatt

SEQ ID NO: 1271 - RNA, 20 nt, synthetic construct
  source 1..20: mol_type = other RNA
ggcattaaaagagatccgat

SEQ ID NO: 1272 - RNA, 20 nt, synthetic construct
  source 1..20: mol_type = other RNA
aaaagagatccgattggaac

SEQ ID NO: 1273 - RNA, 20 nt, synthetic construct
  source 1..20: mol_type = other RNA
taaaagagatccgattggaa

SEQ ID NO: 1274 - RNA, 20 nt, synthetic construct
  source 1..20: mol_type = other RNA
ttaaaagagatccgattgga

SEQ ID NO: 1275 - RNA, 20 nt, synthetic construct
  source 1..20: mol_type = other RNA
attaaaagagatccgattgg

SEQ ID NO: 1276 - RNA, 20 nt, synthetic construct
  source 1..20: mol_type = other RNA
cattaaaagagatccgattg

SEQ ID NO: 1277 - RNA, 20 nt, synthetic construct
  source 1..20: mol_type = other RNA
ctggccgactttggtgaggc

SEQ ID NO: 1278 - RNA, 20 nt, synthetic construct
  source 1..20: mol_type = other RNA
tggccgactttggtgaggct

SEQ ID NO: 1279 - RNA, 20 nt, synthetic construct
  source 1..20: mol_type = other RNA
ggccgactttggtgaggctg

SEQ ID NO: 1280 - RNA, 20 nt, synthetic construct
  source 1..20: mol_type = other RNA
gccgactttggtgaggctgg

SEQ ID NO: 1281 - RNA, 20 nt, synthetic construct
  source 1..20: mol_type = other RNA
ccgactttggtgaggctggg

SEQ ID NO: 1282 - RNA, 20 nt, synthetic construct
  source 1..20: mol_type = other RNA
caccgggacctgaagcccca

SEQ ID NO: 1283 - RNA, 20 nt, synthetic construct
  source 1..20: mol_type = other RNA
accgggacctgaagccccag

SEQ ID NO: 1284 - RNA, 20 nt, synthetic construct
  source 1..20: mol_type = other RNA
ccgggacctgaagccccaga

SEQ ID NO: 1285 - RNA, 20 nt, synthetic construct
  source 1..20: mol_type = other RNA
cgggacctgaagccccagaa

SEQ ID NO: 1286 - RNA, 20 nt, synthetic construct
  source 1..20: mol_type = other RNA
gggacctgaagccccagaac

SEQ ID NO: 1287 - RNA, 20 nt, synthetic construct
  source 1..20: mol_type = other RNA
ggccctgaaagagatccggc

SEQ ID NO: 1288 - RNA, 20 nt, synthetic construct
  source 1..20: mol_type = other RNA
gccctgaaagagatccggct

SEQ ID NO: 1289 - RNA, 20 nt, synthetic construct
  source 1..20: mol_type = other RNA
cctgaaagagatccggctgg

SEQ ID NO: 1290 - RNA, 20 nt, synthetic construct
  source 1..20: mol_type = other RNA
ccctgaaagagatccggctg

SEQ ID NO: 1291 - RNA, 20 nt, synthetic construct
  source 1..20: mol_type = other RNA
ctgaaagagatccggctgga

SEQ ID NO: 1292 - RNA, 20 nt, synthetic construct
  source 1..20: mol_type = other RNA
tgaaagagatccggctggag

SEQ ID NO: 1293 - RNA, 20 nt, synthetic construct
  source 1..20: mol_type = other RNA
gaaagagatccggctggagc

SEQ ID NO: 1294 - RNA, 20 nt, synthetic construct
  source 1..20: mol_type = other RNA
cagagacttggtaagtattt

SEQ ID NO: 1295 - RNA, 20 nt, synthetic construct
  source 1..20: mol_type = other RNA
acagagacttggtaagtatt

SEQ ID NO: 1296 - RNA, 20 nt, synthetic construct
  source 1..20: mol_type = other RNA
cacagagacttggtaagtat

SEQ ID NO: 1297 - RNA, 20 nt, synthetic construct
  source 1..20: mol_type = other RNA
gcaaatatcctagtaatggg

SEQ ID NO: 1298 - RNA, 20 nt, synthetic construct
  source 1..20: mol_type = other RNA
cagcaaatatcctagtaatg

SEQ ID NO: 1299 - RNA, 20 nt, synthetic construct
  source 1..20: mol_type = other RNA
ccagcaaatatcctagtaat

SEQ ID NO: 1300 - RNA, 20 nt, synthetic construct
  source 1..20: mol_type = other RNA
accagcaaatatcctagtaa

SEQ ID NO: 1301 - RNA, 20 nt, synthetic construct
  source 1..20: mol_type = other RNA
caaatatcctagtaatggga

SEQ ID NO: 1302 - RNA, 20 nt, synthetic construct
  source 1..20: mol_type = other RNA
agcaaatatcctagtaatgg

SEQ ID NO: 1303 - RNA, 20 nt, synthetic construct
  source 1..20: mol_type = other RNA
tgaagcaaattgaaggcaca

SEQ ID NO: 1304 - RNA, 20 nt, synthetic construct
  source 1..20: mol_type = other RNA
ttgaagcaaattgaaggcac

SEQ ID NO: 1305 - RNA, 20 nt, synthetic construct
  source 1..20: mol_type = other RNA
attgaagcaaattgaaggca

SEQ ID NO: 1306 - RNA, 20 nt, synthetic construct
  source 1..20: mol_type = other RNA
cattgaagcaaattgaaggc

SEQ ID NO: 1307 - RNA, 20 nt, synthetic construct
  source 1..20: mol_type = other RNA
gcattgaagcaaattgaagg

SEQ ID NO: 1308 - RNA, 20 nt, synthetic construct
  source 1..20: mol_type = other RNA
tgcattgaagcaaattgaag

SEQ ID NO: 1309 - RNA, 20 nt, synthetic construct
  source 1..20: mol_type = other RNA
tagcagactttggactagcc

SEQ ID NO: 1310 - RNA, 20 nt, synthetic construct
  source 1..20: mol_type = other RNA
gcagactttggactagccag

SEQ ID NO: 1311 - RNA, 20 nt, synthetic construct
  source 1..20: mol_type = other RNA
ctagcagactttggactagc

SEQ ID NO: 1312 - RNA, 20 nt, synthetic construct
  source 1..20: mol_type = other RNA
agcagactttggactagcca

SEQ ID NO: 1313 - RNA, 20 nt, synthetic construct
  source 1..20: mol_type = other RNA
cagactttggactagccaga

SEQ ID NO: 1314 - RNA, 20 nt, synthetic construct
  source 1..20: mol_type = other RNA
caccgagaccttaaacctca

SEQ ID NO: 1315 - RNA, 20 nt, synthetic construct
  source 1..20: mol_type = other RNA
accgagaccttaaacctcag

SEQ ID NO: 1316 - RNA, 20 nt, synthetic construct
  source 1..20: mol_type = other RNA
ccgagaccttaaacctcaga

SEQ ID NO: 1317 - RNA, 20 nt, synthetic construct
  source 1..20: mol_type = other RNA
cgagaccttaaacctcagaa

SEQ ID NO: 1318 - RNA, 20 nt, synthetic construct
  source 1..20: mol_type = other RNA
gagaccttaaacctcagaat

SEQ ID NO: 1319 - RNA, 20 nt, synthetic construct
  source 1..20: mol_type = other RNA
cagaatctgcttattaacac

SEQ ID NO: 1320 - RNA, 20 nt, synthetic construct
  source 1..20: mol_type = other RNA
acctcagaatctgcttatta

SEQ ID NO: 1321 - RNA, 20 nt, synthetic construct
  source 1..20: mol_type = other RNA
cctcagaatctgcttattaa

SEQ ID NO: 1322 - RNA, 20 nt, synthetic construct
  source 1..20: mol_type = other RNA
ctcagaatctgcttattaac

SEQ ID NO: 1323 - RNA, 20 nt, synthetic construct
  source 1..20: mol_type = other RNA
tcagaatctgcttattaaca

SEQ ID NO: 1324 - RNA, 20 nt, synthetic construct
  source 1..20: mol_type = other RNA
agaatctgcttattaacaca

SEQ ID NO: 1325 - RNA, 20 nt, synthetic construct
  source 1..20: mol_type = other RNA
ggcgcttaagaaaatccgcc

SEQ ID NO: 1326 - RNA, 20 nt, synthetic construct
  source 1..20: mol_type = other RNA
gcgcttaagaaaatccgcct

SEQ ID NO: 1327 - RNA, 20 nt, synthetic construct
  source 1..20: mol_type = other RNA
cgcttaagaaaatccgcctg

SEQ ID NO: 1328 - RNA, 20 nt, synthetic construct
  source 1..20: mol_type = other RNA
gcttaagaaaatccgcctgg

SEQ ID NO: 1329 - RNA, 20 nt, synthetic construct
  source 1..20: mol_type = other RNA
cttaagaaaatccgcctgga

SEQ ID NO: 1330 - RNA, 20 nt, synthetic construct
  source 1..20: mol_type = other RNA
ttaagaaaatccgcctggac

SEQ ID NO: 1331 - RNA, 20 nt, synthetic construct
  source 1..20: mol_type = other RNA
gcggactttggcctggctcg

SEQ ID NO: 1332 - RNA, 20 nt, synthetic construct
  source 1..20: mol_type = other RNA
tagcggactttggcctggct

SEQ ID NO: 1333 - RNA, 20 nt, synthetic construct
  source 1..20: mol_type = other RNA
cggactttggcctggctcga

SEQ ID NO: 1334 - RNA, 20 nt, synthetic construct
  source 1..20: mol_type = other RNA
agcggactttggcctggctc

SEQ ID NO: 1335 - RNA, 20 nt, synthetic construct
  source 1..20: mol_type = other RNA
atagcggactttggcctggc

SEQ ID NO: 1336 - RNA, 20 nt, synthetic construct
  source 1..20: mol_type = other RNA
aggacctgaaacctgccaac

SEQ ID NO: 1337 - RNA, 20 nt, synthetic construct
  source 1..20: mol_type = other RNA
caggacctgaaacctgccaa

SEQ ID NO: 1338 - RNA, 20 nt, synthetic construct
  source 1..20: mol_type = other RNA
ccaggacctgaaacctgcca

SEQ ID NO: 1339 - RNA, 20 nt, synthetic construct
  source 1..20: mol_type = other RNA
cccaggacctgaaacctgcc

SEQ ID NO: 1340 - RNA, 20 nt, synthetic construct
  source 1..20: mol_type = other RNA
tcccaggacctgaaacctgc

SEQ ID NO: 1341 - RNA, 20 nt, synthetic construct
  source 1..20: mol_type = other RNA
cctgccaacctgctcatcag

SEQ ID NO: 1342 - RNA, 20 nt, synthetic construct
  source 1..20: mol_type = other RNA
ccaacctgctcatcagcgcc

SEQ ID NO: 1343 - RNA, 20 nt, synthetic construct
  source 1..20: mol_type = other RNA
gccaacctgctcatcagcgc

SEQ ID NO: 1344 - RNA, 20 nt, synthetic construct
  source 1..20: mol_type = other RNA
tgccaacctgctcatcagcg

SEQ ID NO: 1345 - RNA, 20 nt, synthetic construct
  source 1..20: mol_type = other RNA
ctgccaacctgctcatcagc

SEQ ID NO: 1346 - RNA, 20 nt, synthetic construct
  source 1..20: mol_type = other RNA
acctgccaacctgctcatca

SEQ ID NO: 1347 - RNA, 20 nt, synthetic construct
  source 1..20: mol_type = other RNA
tcaagaaggtggccctaagg

SEQ ID NO: 1348 - RNA, 20 nt, synthetic construct
  source 1..20: mol_type = other RNA
cctcaagaaggtggccctaa

SEQ ID NO: 1349 - RNA, 20 nt, synthetic construct
  source 1..20: mol_type = other RNA
ccctcaagaaggtggcccta

SEQ ID NO: 1350 - RNA, 20 nt, synthetic construct
  source 1..20: mol_type = other RNA
ctcaagaaggtggccctaag

SEQ ID NO: 1351 - RNA, 20 nt, synthetic construct
  source 1..20: mol_type = other RNA
gccctcaagaaggtggccct

SEQ ID NO: 1352 - RNA, 20 nt, synthetic construct
  source 1..20: mol_type = other RNA
tgccctcaagaaggtggccc

SEQ ID NO: 1353 - RNA, 20 nt, synthetic construct
  source 1..20: mol_type = other RNA
tggctgacttcggcctggct

SEQ ID NO: 1354 - RNA, 20 nt, synthetic construct
  source 1..20: mol_type = other RNA
gctgacttcggcctggctcg

SEQ ID NO: 1355 - RNA, 20 nt, synthetic construct
  source 1..20: mol_type = other RNA
ctggctgacttcggcctggc

SEQ ID NO: 1356 - RNA, 20 nt, synthetic construct
  source 1..20: mol_type = other RNA
ggctgacttcggcctggctc

SEQ ID NO: 1357 - RNA, 20 nt, synthetic construct
  source 1..20: mol_type = other RNA
ctgacttcggcctggctcgc

SEQ ID NO: 1358 - RNA, 20 nt, synthetic construct
  source 1..20: mol_type = other RNA
caccgagacctgaagcccca

SEQ ID NO: 1359 - RNA, 20 nt, synthetic construct
  source 1..20: mol_type = other RNA
accgagacctgaagccccag

SEQ ID NO: 1360 - RNA, 20 nt, synthetic construct
  source 1..20: mol_type = other RNA
ccgagacctgaagccccaga

SEQ ID NO: 1361 - RNA, 20 nt, synthetic construct
  source 1..20: mol_type = other RNA
cgagacctgaagccccagaa

SEQ ID NO: 1362 - RNA, 20 nt, synthetic construct
  source 1..20: mol_type = other RNA
gagacctgaagccccagaac

SEQ ID NO: 1363 - RNA, 20 nt, synthetic construct
  source 1..20: mol_type = other RNA
ccagaacctgctcatcaatg

SEQ ID NO: 1364 - RNA, 20 nt, synthetic construct
  source 1..20: mol_type = other RNA
cccagaacctgctcatcaat

SEQ ID NO: 1365 - RNA, 20 nt, synthetic construct
  source 1..20: mol_type = other RNA
cagaacctgctcatcaatga

SEQ ID NO: 1366 - RNA, 20 nt, synthetic construct
  source 1..20: mol_type = other RNA
agaacctgctcatcaatgag

SEQ ID NO: 1367 - RNA, 20 nt, synthetic construct
  source 1..20: mol_type = other RNA
ccccagaacctgctcatcaa

SEQ ID NO: 1368 - RNA, 20 nt, synthetic construct
  source 1..20: mol_type = other RNA
gccccagaacctgctcatca

SEQ ID NO: 1369 - RNA, 20 nt, synthetic construct
  source 1..20: mol_type = other RNA
ggccctgaagaagatcagac

SEQ ID NO: 1370 - RNA, 20 nt, synthetic construct
  source 1..20: mol_type = other RNA
gccctgaagaagatcagact

SEQ ID NO: 1371 - RNA, 20 nt, synthetic construct
  source 1..20: mol_type = other RNA
ccctgaagaagatcagactg

SEQ ID NO: 1372 - RNA, 20 nt, synthetic construct
  source 1..20: mol_type = other RNA
cctgaagaagatcagactgg

SEQ ID NO: 1373 - RNA, 20 nt, synthetic construct
  source 1..20: mol_type = other RNA
ctgaagaagatcagactgga

SEQ ID NO: 1374 - RNA, 20 nt, synthetic construct
  source 1..20: mol_type = other RNA
tgaagaagatcagactggat

SEQ ID NO: 1375 - RNA, 20 nt, synthetic construct
  source 1..20: mol_type = other RNA
tggctgactttggcctggcc

SEQ ID NO: 1376 - RNA, 20 nt, synthetic construct
  source 1..20: mol_type = other RNA
ctgactttggcctggccaga

SEQ ID NO: 1377 - RNA, 20 nt, synthetic construct
  source 1..20: mol_type = other RNA
gctgactttggcctggccag

SEQ ID NO: 1378 - RNA, 20 nt, synthetic construct
  source 1..20: mol_type = other RNA
ggctgactttggcctggcca

SEQ ID NO: 1379 - RNA, 20 nt, synthetic construct
  source 1..20: mol_type = other RNA
ctggctgactttggcctggc

SEQ ID NO: 1380 - RNA, 20 nt, synthetic construct
  source 1..20: mol_type = other RNA
gagatctgaagccagagaac

SEQ ID NO: 1381 - RNA, 20 nt, synthetic construct
  source 1..20: mol_type = other RNA
cgagatctgaagccagagaa

SEQ ID NO: 1382 - RNA, 20 nt, synthetic construct
  source 1..20: mol_type = other RNA
ccgagatctgaagccagaga

SEQ ID NO: 1383 - RNA, 20 nt, synthetic construct
  source 1..20: mol_type = other RNA
accgagatctgaagccagag

SEQ ID NO: 1384 - RNA, 20 nt, synthetic construct
  source 1..20: mol_type = other RNA
caccgagatctgaagccaga

SEQ ID NO: 1385 - RNA, 20 nt, synthetic construct
  source 1..20: mol_type = other RNA
agaacattctggtgacaagt

SEQ ID NO: 1386 - RNA, 20 nt, synthetic construct
  source 1..20: mol_type = other RNA
gagaacattctggtgacaag

SEQ ID NO: 1387 - RNA, 20 nt, synthetic construct
  source 1..20: mol_type = other RNA
cagagaacattctggtgaca

SEQ ID NO: 1388 - RNA, 20 nt, synthetic construct
  source 1..20: mol_type = other RNA
agagaacattctggtgacaa

SEQ ID NO: 1389 - RNA, 20 nt, synthetic construct
  source 1..20: mol_type = other RNA
ccagagaacattctggtgac

SEQ ID NO: 1390 - RNA, 20 nt, synthetic construct
  source 1..20: mol_type = other RNA
gccagagaacattctggtga

SEQ ID NO: 1391 - RNA, 20 nt, synthetic construct
  source 1..20: mol_type = other RNA
tcaagagtgtgagagtcccc

SEQ ID NO: 1392 - RNA, 20 nt, synthetic construct
  source 1..20: mol_type = other RNA
ctcaagagtgtgagagtccc

SEQ ID NO: 1393 - RNA, 20 nt, synthetic construct
  source 1..20: mol_type = other RNA
cctcaagagtgtgagagtcc

SEQ ID NO: 1394 - RNA, 20 nt, synthetic construct
  source 1..20: mol_type = other RNA
ccctcaagagtgtgagagtc

SEQ ID NO: 1395 - RNA, 20 nt, synthetic construct
  source 1..20: mol_type = other RNA
gccctcaagagtgtgagagt

SEQ ID NO: 1396 - RNA, 20 nt, synthetic construct
  source 1..20: mol_type = other RNA
ggccctcaagagtgtgagag

SEQ ID NO: 1397 - RNA, 20 nt, synthetic construct
  source 1..20: mol_type = other RNA
agggacctgaagccccagaa

SEQ ID NO: 1398 - RNA, 20 nt, synthetic construct
  source 1..20: mol_type = other RNA
cagggacctgaagccccaga

SEQ ID NO: 1399 - RNA, 20 nt, synthetic construct
  source 1..20: mol_type = other RNA
acagggacctgaagccccag

SEQ ID NO: 1400 - RNA, 20 nt, synthetic construct
  source 1..20: mol_type = other RNA
cacagggacctgaagcccca

SEQ ID NO: 1401 - RNA, 20 nt, synthetic construct
  source 1..20: mol_type = other RNA
cagaacctgctaataaacag

SEQ ID NO: 1402 - RNA, 20 nt, synthetic construct
  source 1..20: mol_type = other RNA
ccagaacctgctaataaaca

SEQ ID NO: 1403 - RNA, 20 nt, synthetic construct
  source 1..20: mol_type = other RNA
cccagaacctgctaataaac

SEQ ID NO: 1404 - RNA, 20 nt, synthetic construct
  source 1..20: mol_type = other RNA
agaacctgctaataaacagg

SEQ ID NO: 1405 - RNA, 20 nt, synthetic construct
  source 1..20: mol_type = other RNA
ccccagaacctgctaataaa

SEQ ID NO: 1406 - RNA, 20 nt, synthetic construct
  source 1..20: mol_type = other RNA
gccccagaacctgctaataa

SEQ ID NO: 1407 - RNA, 20 nt, synthetic construct
  source 1..20: mol_type = other RNA
ctgaaacgggtgaggctgga

SEQ ID NO: 1408 - RNA, 20 nt, synthetic construct
  source 1..20: mol_type = other RNA
gctctgaaacgggtgaggct

SEQ ID NO: 1409 - RNA, 20 nt, synthetic construct
  source 1..20: mol_type = other RNA
ggctctgaaacgggtgaggc

SEQ ID NO: 1410 - RNA, 20 nt, synthetic construct
  source 1..20: mol_type = other RNA
gaaacgggtgaggctggatg

SEQ ID NO: 1411 - RNA, 20 nt, synthetic construct
  source 1..20: mol_type = other RNA
tgaaacgggtgaggctggat

SEQ ID NO: 1412 - RNA, 20 nt, synthetic construct
  source 1..20: mol_type = other RNA
tctgaaacgggtgaggctgg

SEQ ID NO: 1413 - RNA, 20 nt, synthetic construct
  source 1..20: mol_type = other RNA
ctctgaaacgggtgaggctg

SEQ ID NO: 1414 - RNA, 20 nt, synthetic construct
  source 1..20: mol_type = other RNA
tcgctgacttcggccttgcc

SEQ ID NO: 1415 - RNA, 20 nt, synthetic construct
  source 1..20: mol_type = other RNA
ctgacttcggccttgcccgc

SEQ ID NO: 1416 - RNA, 20 nt, synthetic construct
  source 1..20: mol_type = other RNA
gctgacttcggccttgcccg

SEQ ID NO: 1417 - RNA, 20 nt, synthetic construct
  source 1..20: mol_type = other RNA
cgctgacttcggccttgccc

SEQ ID NO: 1418 - RNA, 20 nt, synthetic construct
  source 1..20: mol_type = other RNA
ctcgctgacttcggccttgc

SEQ ID NO: 1419 - RNA, 20 nt, synthetic construct
  source 1..20: mol_type = other RNA
gcgatctaaaaccacagaac

SEQ ID NO: 1420 - RNA, 20 nt, synthetic construct
  source 1..20: mol_type = other RNA
cgcgatctaaaaccacagaa

SEQ ID NO: 1421 - RNA, 20 nt, synthetic construct
  source 1..20: mol_type = other RNA
tcgcgatctaaaaccacaga

SEQ ID NO: 1422 - RNA, 20 nt, synthetic construct
  source 1..20: mol_type = other RNA
atcgcgatctaaaaccacag

SEQ ID NO: 1423 - RNA, 20 nt, synthetic construct
  source 1..20: mol_type = other RNA
catcgcgatctaaaaccaca

SEQ ID NO: 1424 - RNA, 20 nt, synthetic construct
  source 1..20: mol_type = other RNA
agaacattctggtgaccagc

SEQ ID NO: 1425 - RNA, 20 nt, synthetic construct
  source 1..20: mol_type = other RNA
cacagaacattctggtgacc

SEQ ID NO: 1426 - RNA, 20 nt, synthetic construct
  source 1..20: mol_type = other RNA
cagaacattctggtgaccag

SEQ ID NO: 1427 - RNA, 20 nt, synthetic construct
  source 1..20: mol_type = other RNA
acagaacattctggtgacca

SEQ ID NO: 1428 - RNA, 20 nt, synthetic construct
  source 1..20: mol_type = other RNA
ccacagaacattctggtgac

SEQ ID NO: 1429 - RNA, 20 nt, synthetic construct
  source 1..20: mol_type = other RNA
accacagaacattctggtga

SEQ ID NO: 1430 - RNA, 20 nt, synthetic construct
  source 1..20: mol_type = other RNA
gttgaagcgcgtgcgggtgc

SEQ ID NO: 1431 - RNA, 20 nt, synthetic construct
  source 1..20: mol_type = other RNA
ggcgttgaagcgcgtgcggg

SEQ ID NO: 1432 - RNA, 20 nt, synthetic construct
  source 1..20: mol_type = other RNA
tgaagcgcgtgcgggtgcag

SEQ ID NO: 1433 - RNA, 20 nt, synthetic construct
  source 1..20: mol_type = other RNA
ttgaagcgcgtgcgggtgca

SEQ ID NO: 1434 - RNA, 20 nt, synthetic construct
  source 1..20: mol_type = other RNA
cgttgaagcgcgtgcgggtg

SEQ ID NO: 1435 - RNA, 20 nt, synthetic construct
  source 1..20: mol_type = other RNA
gcgttgaagcgcgtgcgggt

SEQ ID NO: 1436 - RNA, 20 nt, synthetic construct
  source 1..20: mol_type = other RNA
atataggatctgaaaccaaa

SEQ ID NO: 1437 - RNA, 20 nt, synthetic construct
  source 1..20: mol_type = other RNA
tataggatctgaaaccaaac

SEQ ID NO: 1438 - RNA, 20 nt, synthetic construct
  source 1..20: mol_type = other RNA
ataggatctgaaaccaaaca

SEQ ID NO: 1439 - RNA, 20 nt, synthetic construct
  source 1..20: mol_type = other RNA
taggatctgaaaccaaacaa

SEQ ID NO: 1440 - RNA, 20 nt, synthetic construct
  source 1..20: mol_type = other RNA
aggatctgaaaccaaacaac

SEQ ID NO: 1441 - RNA, 20 nt, synthetic construct
  source 1..20: mol_type = other RNA
ccaaacaacttgttgctaga

SEQ ID NO: 1442 - RNA, 20 nt, synthetic construct
  source 1..20: mol_type = other RNA
accaaacaacttgttgctag

SEQ ID NO: 1443 - RNA, 20 nt, synthetic construct
  source 1..20: mol_type = other RNA
caaacaacttgttgctagat

SEQ ID NO: 1444 - RNA, 20 nt, synthetic construct
  source 1..20: mol_type = other RNA
aaacaacttgttgctagatg

SEQ ID NO: 1445 - RNA, 20 nt, synthetic construct
  source 1..20: mol_type = other RNA
aacaacttgttgctagatga

SEQ ID NO: 1446 - RNA, 20 nt, synthetic construct
  source 1..20: mol_type = other RNA
acaacttgttgctagatgaa

SEQ ID NO: 1447 - RNA, 20 nt, synthetic construct
  source 1..20: mol_type = other RNA
cgccattaagaaagtgagtt

SEQ ID NO: 1448 - RNA, 20 nt, synthetic construct
  source 1..20: mol_type = other RNA
gccattaagaaagtgagtta

SEQ ID NO: 1449 - RNA, 20 nt, synthetic construct
  source 1..20: mol_type = other RNA
ccattaagaaagtgagttac

SEQ ID NO: 1450 - RNA, 20 nt, synthetic construct
  source 1..20: mol_type = other RNA
cattaagaaagtgagttacc

SEQ ID NO: 1451 - RNA, 20 nt, synthetic construct
  source 1..20: mol_type = other RNA
attaagaaagtgagttacct

SEQ ID NO: 1452 - RNA, 20 nt, synthetic construct
  source 1..20: mol_type = other RNA
ttaagaaagtgagttacctt

SEQ ID NO: 1453 - RNA, 20 nt, synthetic construct
  source 1..20: mol_type = other RNA
cagctgacatgggctttgcc

SEQ ID NO: 1454 - RNA, 20 nt, synthetic construct
  source 1..20: mol_type = other RNA
acagctgacatgggctttgc

SEQ ID NO: 1455 - RNA, 20 nt, synthetic construct
  source 1..20: mol_type = other RNA
agctgacatgggctttgccc

SEQ ID NO: 1456 - RNA, 20 nt, synthetic construct
  source 1..20: mol_type = other RNA
gctgacatgggctttgcccg

SEQ ID NO: 1457 - RNA, 20 nt, synthetic construct
  source 1..20: mol_type = other RNA
ctgacatgggctttgcccga

SEQ ID NO: 1458 - RNA, 20 nt, synthetic construct
  source 1..20: mol_type = other RNA
agagatttggtaagttgacc

SEQ ID NO: 1459 - RNA, 20 nt, synthetic construct
  source 1..20: mol_type = other RNA
cacagagatttggtaagttg

SEQ ID NO: 1460 - RNA, 20 nt, synthetic construct
  source 1..20: mol_type = other RNA
acagagatttggtaagttga

SEQ ID NO: 1461 - RNA, 20 nt, synthetic construct
  source 1..20: mol_type = other RNA
cagagatttggtaagttgac

SEQ ID NO: 1462 - RNA, 20 nt, synthetic construct
  source 1..20: mol_type = other RNA
gagatttggtaagttgacct

SEQ ID NO: 1463 - RNA, 20 nt, synthetic construct
  source 1..20: mol_type = other RNA
ttaaaacaaatagaaggaac

SEQ ID NO: 1464 - RNA, 20 nt, synthetic construct
  source 1..20: mol_type = other RNA
taaaacaaatagaaggaact

SEQ ID NO: 1465 - RNA, 20 nt, synthetic construct
  source 1..20: mol_type = other RNA
aaaacaaatagaaggaactg

SEQ ID NO: 1466 - RNA, 20 nt, synthetic construct
  source 1..20: mol_type = other RNA
tgctttaaaacaaatagaag

SEQ ID NO: 1467 - RNA, 20 nt, synthetic construct
  source 1..20: mol_type = other RNA
gctttaaaacaaatagaagg

SEQ ID NO: 1468 - RNA, 20 nt, synthetic construct
  source 1..20: mol_type = other RNA
ctttaaaacaaatagaagga

SEQ ID NO: 1469 - RNA, 20 nt, synthetic construct
  source 1..20: mol_type = other RNA
tttaaaacaaatagaaggaa

SEQ ID NO: 1470 - RNA, 20 nt, synthetic construct
  source 1..20: mol_type = other RNA
tggcagactttgggctggcc

SEQ ID NO: 1471 - RNA, 20 nt, synthetic construct
  source 1..20: mol_type = other RNA
ggcagactttgggctggccc

SEQ ID NO: 1472 - RNA, 20 nt, synthetic construct
  source 1..20: mol_type = other RNA
gcagactttgggctggcccg

SEQ ID NO: 1473 - RNA, 20 nt, synthetic construct
  source 1..20: mol_type = other RNA
ctggcagactttgggctggc

SEQ ID NO: 1474 - RNA, 20 nt, synthetic construct
  source 1..20: mol_type = other RNA
cagactttgggctggcccgg

SEQ ID NO: 1475 - RNA, 20 nt, synthetic construct
  source 1..20: mol_type = other RNA
agggacatgaaggctgctaa

SEQ ID NO: 1476 - RNA, 20 nt, synthetic construct
  source 1..20: mol_type = other RNA
catagggacatgaaggctgc

SEQ ID NO: 1477 - RNA, 20 nt, synthetic construct
  source 1..20: mol_type = other RNA
atagggacatgaaggctgct

SEQ ID NO: 1478 - RNA, 20 nt, synthetic construct
  source 1..20: mol_type = other RNA
tagggacatgaaggctgcta

SEQ ID NO: 1479 - RNA, 20 nt, synthetic construct
  source 1..20: mol_type = other RNA
gggacatgaaggctgctaat

SEQ ID NO: 1480 - RNA, 20 nt, synthetic construct
  source 1..20: mol_type = other RNA
ctgctaatgtgcttatcact

SEQ ID NO: 1481 - RNA, 20 nt, synthetic construct
  source 1..20: mol_type = other RNA
gctaatgtgcttatcactcg

SEQ ID NO: 1482 - RNA, 20 nt, synthetic construct
  source 1..20: mol_type = other RNA
ggctgctaatgtgcttatca

SEQ ID NO: 1483 - RNA, 20 nt, synthetic construct
  source 1..20: mol_type = other RNA
gctgctaatgtgcttatcac

SEQ ID NO: 1484 - RNA, 20 nt, synthetic construct
  source 1..20: mol_type = other RNA
tgctaatgtgcttatcactc

SEQ ID NO: 1485 - RNA, 20 nt, synthetic construct
  source 1..20: mol_type = other RNA
ctaatgtgcttatcactcgt

SEQ ID NO: 1486 - RNA, 20 nt, synthetic construct
  source 1..20: mol_type = other RNA
ggctctgaagaaggtgctga

SEQ ID NO: 1487 - RNA, 20 nt, synthetic construct
  source 1..20: mol_type = other RNA
gctctgaagaaggtgctgat

SEQ ID NO: 1488 - RNA, 20 nt, synthetic construct
  source 1..20: mol_type = other RNA
ctctgaagaaggtgctgatg

SEQ ID NO: 1489 - RNA, 20 nt, synthetic construct
  source 1..20: mol_type = other RNA
tctgaagaaggtgctgatgg

SEQ ID NO: 1490 - RNA, 20 nt, synthetic construct
  source 1..20: mol_type = other RNA
ctgaagaaggtgctgatgga

SEQ ID NO: 1491 - RNA, 20 nt, synthetic construct
  source 1..20: mol_type = other RNA
tgaagaaggtgctgatggaa

SEQ ID NO: 1492 - RNA, 20 nt, synthetic construct
  source 1..20: mol_type = other RNA
ttgtgactttggatttgctc

SEQ ID NO: 1493 - RNA, 20 nt, synthetic construct
  source 1..20: mol_type = other RNA
tttgtgactttggatttgct

SEQ ID NO: 1494 - RNA, 20 nt, synthetic construct
  source 1..20: mol_type = other RNA
gtgactttggatttgctcgg

SEQ ID NO: 1495 - RNA, 20 nt, synthetic construct
  source 1..20: mol_type = other RNA
tgtgactttggatttgctcg

SEQ ID NO: 1496 - RNA, 20 nt, synthetic construct
  source 1..20: mol_type = other RNA
ctttgtgactttggatttgc

SEQ ID NO: 1497 - RNA, 20 nt, synthetic construct
  source 1..20: mol_type = other RNA
gagacgtgaagccagaaaat

SEQ ID NO: 1498 - RNA, 20 nt, synthetic construct
  source 1..20: mol_type = other RNA
agagacgtgaagccagaaaa

SEQ ID NO: 1499 - RNA, 20 nt, synthetic construct
  source 1..20: mol_type = other RNA
tagagacgtgaagccagaaa

SEQ ID NO: 1500 - RNA, 20 nt, synthetic construct
  source 1..20: mol_type = other RNA
atagagacgtgaagccagaa

SEQ ID NO: 1501 - RNA, 20 nt, synthetic construct
  source 1..20: mol_type = other RNA
catagagacgtgaagccaga

SEQ ID NO: 1502 - RNA, 20 nt, synthetic construct
  source 1..20: mol_type = other RNA
gccagaaaatatcctcatca

SEQ ID NO: 1503 - RNA, 20 nt, synthetic construct
  source 1..20: mol_type = other RNA
aaaatatcctcatcacgaaa

SEQ ID NO: 1504 - RNA, 20 nt, synthetic construct
  source 1..20: mol_type = other RNA
gaaaatatcctcatcacgaa

SEQ ID NO: 1505 - RNA, 20 nt, synthetic construct
  source 1..20: mol_type = other RNA
agaaaatatcctcatcacga

SEQ ID NO: 1506 - RNA, 20 nt, synthetic construct
  source 1..20: mol_type = other RNA
cagaaaatatcctcatcacg

SEQ ID NO: 1507 - RNA, 20 nt, synthetic construct
  source 1..20: mol_type = other RNA
ccagaaaatatcctcatcac

SEQ ID NO: 1508 - RNA, 20 nt, synthetic construct
  source 1..20: mol_type = other RNA
aagaagtttctggaatcaga

SEQ ID NO: 1509 - RNA, 20 nt, synthetic construct
  source 1..20: mol_type = other RNA
atcaagaagtttctggaatc

SEQ ID NO: 1510 - RNA, 20 nt, synthetic construct
  source 1..20: mol_type = other RNA
agaagtttctggaatcagaa

SEQ ID NO: 1511 - RNA, 20 nt, synthetic construct
  source 1..20: mol_type = other RNA
caagaagtttctggaatcag

SEQ ID NO: 1512 - RNA, 20 nt, synthetic construct
  source 1..20: mol_type = other RNA
tcaagaagtttctggaatca

SEQ ID NO: 1513 - RNA, 20 nt, synthetic construct
  source 1..20: mol_type = other RNA
catcaagaagtttctggaat

SEQ ID NO: 1514 - RNA, 20 nt, synthetic construct
  source 1..20: mol_type = other RNA
gagatataaagccagagaat

SEQ ID NO: 1515 - RNA, 20 nt, synthetic construct
  source 1..20: mol_type = other RNA
agagatataaagccagagaa

SEQ ID NO: 1516 - RNA, 20 nt, synthetic construct
  source 1..20: mol_type = other RNA
cagagatataaagccagaga

SEQ ID NO: 1517 - RNA, 20 nt, synthetic construct
  source 1..20: mol_type = other RNA
acagagatataaagccagag

SEQ ID NO: 1518 - RNA, 20 nt, synthetic construct
  source 1..20: mol_type = other RNA
cacagagatataaagccaga

SEQ ID NO: 1519 - RNA, 20 nt, synthetic construct
  source 1..20: mol_type = other RNA
agagaatatattagtctccc

SEQ ID NO: 1520 - RNA, 20 nt, synthetic construct
  source 1..20: mol_type = other RNA
agaatatattagtctcccag

SEQ ID NO: 1521 - RNA, 20 nt, synthetic construct
  source 1..20: mol_type = other RNA
gagaatatattagtctccca

SEQ ID NO: 1522 - RNA, 20 nt, synthetic construct
  source 1..20: mol_type = other RNA
cagagaatatattagtctcc

SEQ ID NO: 1523 - RNA, 20 nt, synthetic construct
  source 1..20: mol_type = other RNA
ccagagaatatattagtctc

SEQ ID NO: 1524 - RNA, 20 nt, synthetic construct
  source 1..20: mol_type = other RNA
gccagagaatatattagtct

SEQ ID NO: 1525 - RNA, 20 nt, synthetic construct
  source 1..20: mol_type = other RNA
ataaagaagttcttagaaag

SEQ ID NO: 1526 - RNA, 20 nt, synthetic construct
  source 1..20: mol_type = other RNA
ccataaagaagttcttagaa

SEQ ID NO: 1527 - RNA, 20 nt, synthetic construct
  source 1..20: mol_type = other RNA
taaagaagttcttagaaagt

SEQ ID NO: 1528 - RNA, 20 nt, synthetic construct
  source 1..20: mol_type = other RNA
cataaagaagttcttagaaa

SEQ ID NO: 1529 - RNA, 20 nt, synthetic construct
  source 1..20: mol_type = other RNA
gccataaagaagttcttaga

SEQ ID NO: 1530 - RNA, 20 nt, synthetic construct
  source 1..20: mol_type = other RNA
ggccataaagaagttcttag

SEQ ID NO: 1531 - RNA, 20 nt, synthetic construct
  source 1..20: mol_type = other RNA
gagatataaaacctgagaat

SEQ ID NO: 1532 - RNA, 20 nt, synthetic construct
  source 1..20: mol_type = other RNA
cgagatataaaacctgagaa

SEQ ID NO: 1533 - RNA, 20 nt, synthetic construct
  source 1..20: mol_type = other RNA
tcgagatataaaacctgaga

SEQ ID NO: 1534 - RNA, 20 nt, synthetic construct
  source 1..20: mol_type = other RNA
atcgagatataaaacctgag

SEQ ID NO: 1535 - RNA, 20 nt, synthetic construct
  source 1..20: mol_type = other RNA
catcgagatataaaacctga

SEQ ID NO: 1536 - RNA, 20 nt, synthetic construct
  source 1..20: mol_type = other RNA
gtgacttcgggtttgcacaa

SEQ ID NO: 1537 - RNA, 20 nt, synthetic construct
  source 1..20: mol_type = other RNA
tgtgacttcgggtttgcaca

SEQ ID NO: 1538 - RNA, 20 nt, synthetic construct
  source 1..20: mol_type = other RNA
ttgtgacttcgggtttgcac

SEQ ID NO: 1539 - RNA, 20 nt, synthetic construct
  source 1..20: mol_type = other RNA
tttgtgacttcgggtttgca

SEQ ID NO: 1540 - RNA, 20 nt, synthetic construct
  source 1..20: mol_type = other RNA
atttgtgacttcgggtttgc

SEQ ID NO: 1541 - RNA, 20 nt, synthetic construct
  source 1..20: mol_type = other RNA
gagatataaaacctgaaaat

SEQ ID NO: 1542 - RNA, 20 nt, synthetic construct
  source 1..20: mol_type = other RNA
agagatataaaacctgaaaa

SEQ ID NO: 1543 - RNA, 20 nt, synthetic construct
  source 1..20: mol_type = other RNA
cagagatataaaacctgaaa

SEQ ID NO: 1544 - RNA, 20 nt, synthetic construct
  source 1..20: mol_type = other RNA
acagagatataaaacctgaa

SEQ ID NO: 1545 - RNA, 20 nt, synthetic construct
  source 1..20: mol_type = other RNA
cacagagatataaaacctga

SEQ ID NO: 1546 - RNA, 20 nt, synthetic construct
  source 1..20: mol_type = other RNA
tgaaaatattctaataacta

SEQ ID NO: 1547 - RNA, 20 nt, synthetic construct
  source 1..20: mol_type = other RNA
aaaatattctaataactaag

SEQ ID NO: 1548 - RNA, 20 nt, synthetic construct
  source 1..20: mol_type = other RNA
gaaaatattctaataactaa

SEQ ID NO: 1549 - RNA, 20 nt, synthetic construct
  source 1..20: mol_type = other RNA
ctgaaaatattctaataact

SEQ ID NO: 1550 - RNA, 20 nt, synthetic construct
  source 1..20: mol_type = other RNA
cctgaaaatattctaataac

SEQ ID NO: 1551 - RNA, 20 nt, synthetic construct
  source 1..20: mol_type = other RNA
acctgaaaatattctaataa

SEQ ID NO: 1552 - RNA, 20 nt, synthetic construct
  source 1..20: mol_type = other RNA
gtgactttggtaagttaaaa

SEQ ID NO: 1553 - RNA, 20 nt, synthetic construct
  source 1..20: mol_type = other RNA
ctgtgtgactttggtaagtt

SEQ ID NO: 1554 - RNA, 20 nt, synthetic construct
  source 1..20: mol_type = other RNA
tgtgtgactttggtaagtta

SEQ ID NO: 1555 - RNA, 20 nt, synthetic construct
  source 1..20: mol_type = other RNA
gtgtgactttggtaagttaa

SEQ ID NO: 1556 - RNA, 20 nt, synthetic construct
  source 1..20: mol_type = other RNA
tgtgactttggtaagttaaa

SEQ ID NO: 1557 - RNA, 20 nt, synthetic construct
  source 1..20: mol_type = other RNA
actccagatataaaaccaga

SEQ ID NO: 1558 - RNA, 20 nt, synthetic construct
  source 1..20: mol_type = other RNA
ctccagatataaaaccagaa

SEQ ID NO: 1559 - RNA, 20 nt, synthetic construct
  source 1..20: mol_type = other RNA
tccagatataaaaccagaaa

SEQ ID NO: 1560 - RNA, 20 nt, synthetic construct
  source 1..20: mol_type = other RNA
ccagatataaaaccagaaaa

SEQ ID NO: 1561 - RNA, 20 nt, synthetic construct
  source 1..20: mol_type = other RNA
cagatataaaaccagaaaat

SEQ ID NO: 1562 - RNA, 20 nt, synthetic construct
  source 1..20: mol_type = other RNA
accagaaaatctcttaatca

SEQ ID NO: 1563 - RNA, 20 nt, synthetic construct
  source 1..20: mol_type = other RNA
ccagaaaatctcttaatcag

SEQ ID NO: 1564 - RNA, 20 nt, synthetic construct
  source 1..20: mol_type = other RNA
cagaaaatctcttaatcagc

SEQ ID NO: 1565 - RNA, 20 nt, synthetic construct
  source 1..20: mol_type = other RNA
agaaaatctcttaatcagcc

SEQ ID NO: 1566 - RNA, 20 nt, synthetic construct
  source 1..20: mol_type = other RNA
gaaaatctcttaatcagcca

SEQ ID NO: 1567 - RNA, 20 nt, synthetic construct
  source 1..20: mol_type = other RNA
aaaatctcttaatcagccac

SEQ ID NO: 1568 - RNA, 20 nt, synthetic construct
  source 1..20: mol_type = other RNA
cgatcaagaaattcaaggac

SEQ ID NO: 1569 - RNA, 20 nt, synthetic construct
  source 1..20: mol_type = other RNA
atcaagaaattcaaggacag

SEQ ID NO: 1570 - RNA, 20 nt, synthetic construct
  source 1..20: mol_type = other RNA
ggcgatcaagaaattcaagg

SEQ ID NO: 1571 - RNA, 20 nt, synthetic construct
  source 1..20: mol_type = other RNA
gcgatcaagaaattcaagga

SEQ ID NO: 1572 - RNA, 20 nt, synthetic construct
  source 1..20: mol_type = other RNA
gatcaagaaattcaaggaca

SEQ ID NO: 1573 - RNA, 20 nt, synthetic construct
  source 1..20: mol_type = other RNA
tcaagaaattcaaggacagt

SEQ ID NO: 1574 - RNA, 20 nt, synthetic construct
  source 1..20: mol_type = other RNA
tcagactttggcttggcaac

SEQ ID NO: 1575 - RNA, 20 nt, synthetic construct
  source 1..20: mol_type = other RNA
atctcagactttggcttggc

SEQ ID NO: 1576 - RNA, 20 nt, synthetic construct
  source 1..20: mol_type = other RNA
tctcagactttggcttggca

SEQ ID NO: 1577 - RNA, 20 nt, synthetic construct
  source 1..20: mol_type = other RNA
ctcagactttggcttggcaa

SEQ ID NO: 1578 - RNA, 20 nt, synthetic construct
  source 1..20: mol_type = other RNA
cagactttggcttggcaaca

SEQ ID NO: 1579 - RNA, 20 nt, synthetic construct
  source 1..20: mol_type = other RNA
cacagggatattaaaccaga

SEQ ID NO: 1580 - RNA, 20 nt, synthetic construct
  source 1..20: mol_type = other RNA
acagggatattaaaccagaa

SEQ ID NO: 1581 - RNA, 20 nt, synthetic construct
  source 1..20: mol_type = other RNA
cagggatattaaaccagaaa

SEQ ID NO: 1582 - RNA, 20 nt, synthetic construct
  source 1..20: mol_type = other RNA
agggatattaaaccagaaaa

SEQ ID NO: 1583 - RNA, 20 nt, synthetic construct
  source 1..20: mol_type = other RNA
gggatattaaaccagaaaat

SEQ ID NO: 1584 - RNA, 20 nt, synthetic construct
  source 1..20: mol_type = other RNA
ccagaaaatcttctgttgga

SEQ ID NO: 1585 - RNA, 20 nt, synthetic construct
  source 1..20: mol_type = other RNA
aaaatcttctgttggatgaa

SEQ ID NO: 1586 - RNA, 20 nt, synthetic construct
  source 1..20: mol_type = other RNA
accagaaaatcttctgttgg

SEQ ID NO: 1587 - RNA, 20 nt, synthetic construct
  source 1..20: mol_type = other RNA
cagaaaatcttctgttggat

SEQ ID NO: 1588 - RNA, 20 nt, synthetic construct
  source 1..20: mol_type = other RNA
agaaaatcttctgttggatg

SEQ ID NO: 1589 - RNA, 20 nt, synthetic construct
  source 1..20: mol_type = other RNA
gaaaatcttctgttggatga

SEQ ID NO: 1590 - RNA, 20 nt, synthetic construct
  source 1..20: mol_type = other RNA
cgcagtgaagattgtagata

SEQ ID NO: 1591 - RNA, 20 nt, synthetic construct
  source 1..20: mol_type = other RNA
agtgaagattgtagatatga

SEQ ID NO: 1592 - RNA, 20 nt, synthetic construct
  source 1..20: mol_type = other RNA
tgaagattgtagatatgaag

SEQ ID NO: 1593 - RNA, 20 nt, synthetic construct
  source 1..20: mol_type = other RNA
gcagtgaagattgtagatat

SEQ ID NO: 1594 - RNA, 20 nt, synthetic construct
  source 1..20: mol_type = other RNA
cagtgaagattgtagatatg

SEQ ID NO: 1595 - RNA, 20 nt, synthetic construct
  source 1..20: mol_type = other RNA
gtgaagattgtagatatgaa

SEQ ID NO: 1596 - RNA, 20 nt, synthetic construct
  source 1..20: mol_type = other RNA
cgtgacttaaagccagagaa

SEQ ID NO: 1597 - RNA, 20 nt, synthetic construct
  source 1..20: mol_type = other RNA
gtgacttaaagccagagaat

SEQ ID NO: 1598 - RNA, 20 nt, synthetic construct
  source 1..20: mol_type = other RNA
ccgtgacttaaagccagaga

SEQ ID NO: 1599 - RNA, 20 nt, synthetic construct
  source 1..20: mol_type = other RNA
accgtgacttaaagccagag

SEQ ID NO: 1600 - RNA, 20 nt, synthetic construct
  source 1..20: mol_type = other RNA
caccgtgacttaaagccaga

SEQ ID NO: 1601 - RNA, 20 nt, synthetic construct
  source 1..20: mol_type = other RNA
cataaagatcatcagcaaaa

SEQ ID NO: 1602 - RNA, 20 nt, synthetic construct
  source 1..20: mol_type = other RNA
ccataaagatcatcagcaaa

SEQ ID NO: 1603 - RNA, 20 nt, synthetic construct
  source 1..20: mol_type = other RNA
taaagatcatcagcaaaagg

SEQ ID NO: 1604 - RNA, 20 nt, synthetic construct
  source 1..20: mol_type = other RNA
ataaagatcatcagcaaaag

SEQ ID NO: 1605 - RNA, 20 nt, synthetic construct
  source 1..20: mol_type = other RNA
gccataaagatcatcagcaa

SEQ ID NO: 1606 - RNA, 20 nt, synthetic construct
  source 1..20: mol_type = other RNA
agccataaagatcatcagca

SEQ ID NO: 1607 - RNA, 20 nt, synthetic construct
  source 1..20: mol_type = other RNA
tcattgatttcgaatacagc

SEQ ID NO: 1608 - RNA, 20 nt, synthetic construct
  source 1..20: mol_type = other RNA
ttgatttcgaatacagcagt

SEQ ID NO: 1609 - RNA, 20 nt, synthetic construct
  source 1..20: mol_type = other RNA
attgatttcgaatacagcag

SEQ ID NO: 1610 - RNA, 20 nt, synthetic construct
  source 1..20: mol_type = other RNA
cattgatttcgaatacagca

SEQ ID NO: 1611 - RNA, 20 nt, synthetic construct
  source 1..20: mol_type = other RNA
ctcattgatttcgaatacag

SEQ ID NO: 1612 - RNA, 20 nt, synthetic construct
  source 1..20: mol_type = other RNA
taatgactgtcaagaaggta

SEQ ID NO: 1613 - RNA, 20 nt, synthetic construct
  source 1..20: mol_type = other RNA
atgactgtcaagaaggtaag

SEQ ID NO: 1614 - RNA, 20 nt, synthetic construct
  source 1..20: mol_type = other RNA
aatgactgtcaagaaggtaa

SEQ ID NO: 1615 - RNA, 20 nt, synthetic construct
  source 1..20: mol_type = other RNA
ataatgactgtcaagaaggt

SEQ ID NO: 1616 - RNA, 20 nt, synthetic construct
  source 1..20: mol_type = other RNA
cataatgactgtcaagaagg

SEQ ID NO: 1617 - RNA, 20 nt, synthetic construct
  source 1..20: mol_type = other RNA
gtaatatcttgttgctggaa

SEQ ID NO: 1618 - RNA, 20 nt, synthetic construct
  source 1..20: mol_type = other RNA
ggtaatatcttgttgctgga

SEQ ID NO: 1619 - RNA, 20 nt, synthetic construct
  source 1..20: mol_type = other RNA
gcaggtaatatcttgttgct

SEQ ID NO: 1620 - RNA, 20 nt, synthetic construct
  source 1..20: mol_type = other RNA
tgcaggtaatatcttgttgc

SEQ ID NO: 1621 - RNA, 20 nt, synthetic construct
  source 1..20: mol_type = other RNA
aggtaatatcttgttgctgg

SEQ ID NO: 1622 - RNA, 20 nt, synthetic construct
  source 1..20: mol_type = other RNA
caggtaatatcttgttgctg

SEQ ID NO: 1623 - RNA, 20 nt, synthetic construct
  source 1..20: mol_type = other RNA
tggtggacttcgagtacagc

SEQ ID NO: 1624 - RNA, 20 nt, synthetic construct
  source 1..20: mol_type = other RNA
tggacttcgagtacagcagt

SEQ ID NO: 1625 - RNA, 20 nt, synthetic construct
  source 1..20: mol_type = other RNA
gtggacttcgagtacagcag

SEQ ID NO: 1626 - RNA, 20 nt, synthetic construct
  source 1..20: mol_type = other RNA
ggtggacttcgagtacagca

SEQ ID NO: 1627 - RNA, 20 nt, synthetic construct
  source 1..20: mol_type = other RNA
ctggtggacttcgagtacag

SEQ ID NO: 1628 - RNA, 20 nt, synthetic construct
  source 1..20: mol_type = other RNA
atgacatccaggaaggtagg

SEQ ID NO: 1629 - RNA, 20 nt, synthetic construct
  source 1..20: mol_type = other RNA
caatgacatccaggaaggta

SEQ ID NO: 1630 - RNA, 20 nt, synthetic construct
  source 1..20: mol_type = other RNA
acaatgacatccaggaaggt

SEQ ID NO: 1631 - RNA, 20 nt, synthetic construct
  source 1..20: mol_type = other RNA
aatgacatccaggaaggtag

SEQ ID NO: 1632 - RNA, 20 nt, synthetic construct
  source 1..20: mol_type = other RNA
cacaatgacatccaggaagg

SEQ ID NO: 1633 - RNA, 20 nt, synthetic construct
  source 1..20: mol_type = other RNA
gggaacatcttgctgctctc

SEQ ID NO: 1634 - RNA, 20 nt, synthetic construct
  source 1..20: mol_type = other RNA
ggaacatcttgctgctctca

SEQ ID NO: 1635 - RNA, 20 nt, synthetic construct
  source 1..20: mol_type = other RNA
agggaacatcttgctgctct

SEQ ID NO: 1636 - RNA, 20 nt, synthetic construct
  source 1..20: mol_type = other RNA
cagggaacatcttgctgctc

SEQ ID NO: 1637 - RNA, 20 nt, synthetic construct
  source 1..20: mol_type = other RNA
ccagggaacatcttgctgct

SEQ ID NO: 1638 - RNA, 20 nt, synthetic construct
  source 1..20: mol_type = other RNA
cccagggaacatcttgctgc

SEQ ID NO: 1639 - RNA, 20 nt, synthetic construct
  source 1..20: mol_type = other RNA
attgatctgggatatgccaa

SEQ ID NO: 1640 - RNA, 20 nt, synthetic construct
  source 1..20: mol_type = other RNA
ttgatctgggatatgccaaa

SEQ ID NO: 1641 - RNA, 20 nt, synthetic construct
  source 1..20: mol_type = other RNA
aattgatctgggatatgcca

SEQ ID NO: 1642 - RNA, 20 nt, synthetic construct
  source 1..20: mol_type = other RNA
taattgatctgggatatgcc

SEQ ID NO: 1643 - RNA, 20 nt, synthetic construct
  source 1..20: mol_type = other RNA
ataattgatctgggatatgc

SEQ ID NO: 1644 - RNA, 20 nt, synthetic construct
  source 1..20: mol_type = other RNA
gagatctaaaacctgaaaac

SEQ ID NO: 1645 - RNA, 20 nt, synthetic construct
  source 1..20: mol_type = other RNA
cgagatctaaaacctgaaaa

SEQ ID NO: 1646 - RNA, 20 nt, synthetic construct
  source 1..20: mol_type = other RNA
tcgagatctaaaacctgaaa

SEQ ID NO: 1647 - RNA, 20 nt, synthetic construct
  source 1..20: mol_type = other RNA
atcgagatctaaaacctgaa

SEQ ID NO: 1648 - RNA, 20 nt, synthetic construct
  source 1..20: mol_type = other RNA
catcgagatctaaaacctga

SEQ ID NO: 1649 - RNA, 20 nt, synthetic construct
  source 1..20: mol_type = other RNA
gaaaacatagttcttcagga

SEQ ID NO: 1650 - RNA, 20 nt, synthetic construct
  source 1..20: mol_type = other RNA
cctgaaaacatagttcttca

SEQ ID NO: 1651 - RNA, 20 nt, synthetic construct
  source 1..20: mol_type = other RNA
acctgaaaacatagttcttc

SEQ ID NO: 1652 - RNA, 20 nt, synthetic construct
  source 1..20: mol_type = other RNA
aaaacatagttcttcaggat

SEQ ID NO: 1653 - RNA, 20 nt, synthetic construct
  source 1..20: mol_type = other RNA
tgaaaacatagttcttcagg

SEQ ID NO: 1654 - RNA, 20 nt, synthetic construct
  source 1..20: mol_type = other RNA
ctgaaaacatagttcttcag

SEQ ID NO: 1655 - RNA, 20 nt, synthetic construct
  source 1..20: mol_type = other RNA
aattaagtcttgtcgcctag

SEQ ID NO: 1656 - RNA, 20 nt, synthetic construct
  source 1..20: mol_type = other RNA
gcaattaagtcttgtcgcct

SEQ ID NO: 1657 - RNA, 20 nt, synthetic construct
  source 1..20: mol_type = other RNA
ttaagtcttgtcgcctagag

SEQ ID NO: 1658 - RNA, 20 nt, synthetic construct
  source 1..20: mol_type = other RNA
attaagtcttgtcgcctaga

SEQ ID NO: 1659 - RNA, 20 nt, synthetic construct
  source 1..20: mol_type = other RNA
caattaagtcttgtcgccta

SEQ ID NO: 1660 - RNA, 20 nt, synthetic construct
  source 1..20: mol_type = other RNA
agcaattaagtcttgtcgcc

SEQ ID NO: 1661 - RNA, 20 nt, synthetic construct
  source 1..20: mol_type = other RNA
gcagactttggtttggcccg

SEQ ID NO: 1662 - RNA, 20 nt, synthetic construct
  source 1..20: mol_type = other RNA
ttgcagactttggtttggcc

SEQ ID NO: 1663 - RNA, 20 nt, synthetic construct
  source 1..20: mol_type = other RNA
cagactttggtttggcccga

SEQ ID NO: 1664 - RNA, 20 nt, synthetic construct
  source 1..20: mol_type = other RNA
tgcagactttggtttggccc

SEQ ID NO: 1665 - RNA, 20 nt, synthetic construct
  source 1..20: mol_type = other RNA
attgcagactttggtttggc

SEQ ID NO: 1666 - RNA, 20 nt, synthetic construct
  source 1..20: mol_type = other RNA
gagacttaaagcctgagaac

SEQ ID NO: 1667 - RNA, 20 nt, synthetic construct
  source 1..20: mol_type = other RNA
cgagacttaaagcctgagaa

SEQ ID NO: 1668 - RNA, 20 nt, synthetic construct
  source 1..20: mol_type = other RNA
tcgagacttaaagcctgaga

SEQ ID NO: 1669 - RNA, 20 nt, synthetic construct
  source 1..20: mol_type = other RNA
atcgagacttaaagcctgag

SEQ ID NO: 1670 - RNA, 20 nt, synthetic construct
  source 1..20: mol_type = other RNA
catcgagacttaaagcctga

SEQ ID NO: 1671 - RNA, 20 nt, synthetic construct
  source 1..20: mol_type = other RNA
ctgagaacctcctctgcatg

SEQ ID NO: 1672 - RNA, 20 nt, synthetic construct
  source 1..20: mol_type = other RNA
cctgagaacctcctctgcat

SEQ ID NO: 1673 - RNA, 20 nt, synthetic construct
  source 1..20: mol_type = other RNA
gcctgagaacctcctctgca

SEQ ID NO: 1674 - RNA, 20 nt, synthetic construct
  source 1..20: mol_type = other RNA
agaacctcctctgcatggga

SEQ ID NO: 1675 - RNA, 20 nt, synthetic construct
  source 1..20: mol_type = other RNA
gagaacctcctctgcatggg

SEQ ID NO: 1676 - RNA, 20 nt, synthetic construct
  source 1..20: mol_type = other RNA
tgagaacctcctctgcatgg

SEQ ID NO: 1677 - RNA, 20 nt, synthetic construct
  source 1..20: mol_type = other RNA
gagacatcaagcctgagaac

SEQ ID NO: 1678 - RNA, 20 nt, synthetic construct
  source 1..20: mol_type = other RNA
agagacatcaagcctgagaa

SEQ ID NO: 1679 - RNA, 20 nt, synthetic construct
  source 1..20: mol_type = other RNA
cagagacatcaagcctgaga

SEQ ID NO: 1680 - RNA, 20 nt, synthetic construct
  source 1..20: mol_type = other RNA
acagagacatcaagcctgag

SEQ ID NO: 1681 - RNA, 20 nt, synthetic construct
  source 1..20: mol_type = other RNA
tacagagacatcaagcctga

SEQ ID NO: 1682 - RNA, 20 nt, synthetic construct
  source 1..20: mol_type = other RNA
ctgagaacattctcgttgac

SEQ ID NO: 1683 - RNA, 20 nt, synthetic construct
  source 1..20: mol_type = other RNA
agaacattctcgttgaccgc

SEQ ID NO: 1684 - RNA, 20 nt, synthetic construct
  source 1..20: mol_type = other RNA
gagaacattctcgttgaccg

SEQ ID NO: 1685 - RNA, 20 nt, synthetic construct
  source 1..20: mol_type = other RNA
tgagaacattctcgttgacc

SEQ ID NO: 1686 - RNA, 20 nt, synthetic construct
  source 1..20: mol_type = other RNA
cctgagaacattctcgttga

SEQ ID NO: 1687 - RNA, 20 nt, synthetic construct
  source 1..20: mol_type = other RNA
gcctgagaacattctcgttg

SEQ ID NO: 1688 - RNA, 20 nt, synthetic construct
  source 1..20: mol_type = other RNA
atgaaagtgatgaagaagaa

SEQ ID NO: 1689 - RNA, 20 nt, synthetic construct
  source 1..20: mol_type = other RNA
tatgaaagtgatgaagaaga

SEQ ID NO: 1690 - RNA, 20 nt, synthetic construct
  source 1..20: mol_type = other RNA
tgctatgaaagtgatgaaga

SEQ ID NO: 1691 - RNA, 20 nt, synthetic construct
  source 1..20: mol_type = other RNA
gaaagtgatgaagaagaagg

SEQ ID NO: 1692 - RNA, 20 nt, synthetic construct
  source 1..20: mol_type = other RNA
tgaaagtgatgaagaagaag

SEQ ID NO: 1693 - RNA, 20 nt, synthetic construct
  source 1..20: mol_type = other RNA
ctatgaaagtgatgaagaag

SEQ ID NO: 1694 - RNA, 20 nt, synthetic construct
  source 1..20: mol_type = other RNA
gctatgaaagtgatgaagaa

SEQ ID NO: 1695 - RNA, 20 nt, synthetic construct
  source 1..20: mol_type = other RNA
tagactttggtagtgcaaca

SEQ ID NO: 1696 - RNA, 20 nt, synthetic construct
  source 1..20: mol_type = other RNA
gtagactttggtagtgcaac

SEQ ID NO: 1697 - RNA, 20 nt, synthetic construct
  source 1..20: mol_type = other RNA
tgtagactttggtagtgcaa

SEQ ID NO: 1698 - RNA, 20 nt, synthetic construct
  source 1..20: mol_type = other RNA
ttgtagactttggtagtgca

SEQ ID NO: 1699 - RNA, 20 nt, synthetic construct
  source 1..20: mol_type = other RNA
gttgtagactttggtagtgc

SEQ ID NO: 1700 - RNA, 20 nt, synthetic construct
  source 1..20: mol_type = other RNA
cagacttaaagcctgaaaac

SEQ ID NO: 1701 - RNA, 20 nt, synthetic construct
  source 1..20: mol_type = other RNA
acagacttaaagcctgaaaa

SEQ ID NO: 1702 - RNA, 20 nt, synthetic construct
  source 1..20: mol_type = other RNA
cacagacttaaagcctgaaa

SEQ ID NO: 1703 - RNA, 20 nt, synthetic construct
  source 1..20: mol_type = other RNA
acacagacttaaagcctgaa

SEQ ID NO: 1704 - RNA, 20 nt, synthetic construct
  source 1..20: mol_type = other RNA
cacacagacttaaagcctga

SEQ ID NO: 1705 - RNA, 20 nt, synthetic construct
  source 1..20: mol_type = other RNA
tgaaaacatcttatttgtgc

SEQ ID NO: 1706 - RNA, 20 nt, synthetic construct
  source 1..20: mol_type = other RNA
gcctgaaaacatcttatttg

SEQ ID NO: 1707 - RNA, 20 nt, synthetic construct
  source 1..20: mol_type = other RNA
aaaacatcttatttgtgcag

SEQ ID NO: 1708 - RNA, 20 nt, synthetic construct
  source 1..20: mol_type = other RNA
gaaaacatcttatttgtgca

SEQ ID NO: 1709 - RNA, 20 nt, synthetic construct
  source 1..20: mol_type = other RNA
ctgaaaacatcttatttgtg

SEQ ID NO: 1710 - RNA, 20 nt, synthetic construct
  source 1..20: mol_type = other RNA
cctgaaaacatcttatttgt

SEQ ID NO: 1711 - RNA, 20 nt, synthetic construct
  source 1..20: mol_type = other RNA
tagactttggcagtgccacc

SEQ ID NO: 1712 - RNA, 20 nt, synthetic construct
  source 1..20: mol_type = other RNA
gtagactttggcagtgccac

SEQ ID NO: 1713 - RNA, 20 nt, synthetic construct
  source 1..20: mol_type = other RNA
ggtagactttggcagtgcca

SEQ ID NO: 1714 - RNA, 20 nt, synthetic construct
  source 1..20: mol_type = other RNA
tggtagactttggcagtgcc

SEQ ID NO: 1715 - RNA, 20 nt, synthetic construct
  source 1..20: mol_type = other RNA
gtggtagactttggcagtgc

SEQ ID NO: 1716 - RNA, 20 nt, synthetic construct
  source 1..20: mol_type = other RNA
cagacctcaagcctgaaaat

SEQ ID NO: 1717 - RNA, 20 nt, synthetic construct
  source 1..20: mol_type = other RNA
acagacctcaagcctgaaaa

SEQ ID NO: 1718 - RNA, 20 nt, synthetic construct
  source 1..20: mol_type = other RNA
tacagacctcaagcctgaaa

SEQ ID NO: 1719 - RNA, 20 nt, synthetic construct
  source 1..20: mol_type = other RNA
atacagacctcaagcctgaa

SEQ ID NO: 1720 - RNA, 20 nt, synthetic construct
  source 1..20: mol_type = other RNA
catacagacctcaagcctga

SEQ ID NO: 1721 - RNA, 20 nt, synthetic construct
  source 1..20: mol_type = other RNA
gcctgaaaatattctgtttg

SEQ ID NO: 1722 - RNA, 20 nt, synthetic construct
  source 1..20: mol_type = other RNA
aaaatattctgtttgtgaat

SEQ ID NO: 1723 - RNA, 20 nt, synthetic construct
  source 1..20: mol_type = other RNA
gaaaatattctgtttgtgaa

SEQ ID NO: 1724 - RNA, 20 nt, synthetic construct
  source 1..20: mol_type = other RNA
tgaaaatattctgtttgtga

SEQ ID NO: 1725 - RNA, 20 nt, synthetic construct
  source 1..20: mol_type = other RNA
ctgaaaatattctgtttgtg

SEQ ID NO: 1726 - RNA, 20 nt, synthetic construct
  source 1..20: mol_type = other RNA
cctgaaaatattctgtttgt

SEQ ID NO: 1727 - RNA, 20 nt, synthetic construct
  source 1..20: mol_type = other RNA
ctgaagatcattaagaatgt

SEQ ID NO: 1728 - RNA, 20 nt, synthetic construct
  source 1..20: mol_type = other RNA
cctgaagatcattaagaatg

SEQ ID NO: 1729 - RNA, 20 nt, synthetic construct
  source 1..20: mol_type = other RNA
gccctgaagatcattaagaa

SEQ ID NO: 1730 - RNA, 20 nt, synthetic construct
  source 1..20: mol_type = other RNA
tgaagatcattaagaatgtg

SEQ ID NO: 1731 - RNA, 20 nt, synthetic construct
  source 1..20: mol_type = other RNA
ccctgaagatcattaagaat

SEQ ID NO: 1732 - RNA, 20 nt, synthetic construct
  source 1..20: mol_type = other RNA
tgccctgaagatcattaaga

SEQ ID NO: 1733 - RNA, 20 nt, synthetic construct
  source 1..20: mol_type = other RNA
gtggctgactttggcagtgc

SEQ ID NO: 1734 - RNA, 20 nt, synthetic construct
  source 1..20: mol_type = other RNA
tggctgactttggcagtgcc

SEQ ID NO: 1735 - RNA, 20 nt, synthetic construct
  source 1..20: mol_type = other RNA
ggctgactttggcagtgcca

SEQ ID NO: 1736 - RNA, 20 nt, synthetic construct
  source 1..20: mol_type = other RNA
gctgactttggcagtgccac

SEQ ID NO: 1737 - RNA, 20 nt, synthetic construct
  source 1..20: mol_type = other RNA
ctgactttggcagtgccaca

SEQ ID NO: 1738 - RNA, 20 nt, synthetic construct
  source 1..20: mol_type = other RNA
catacagacttgaaaccaga

SEQ ID NO: 1739 - RNA, 20 nt, synthetic construct
  source 1..20: mol_type = other RNA
atacagacttgaaaccagag

SEQ ID NO: 1740 - RNA, 20 nt, synthetic construct
  source 1..20: mol_type = other RNA
tacagacttgaaaccagaga

SEQ ID NO: 1741 - RNA, 20 nt, synthetic construct
  source 1..20: mol_type = other RNA
acagacttgaaaccagagaa

SEQ ID NO: 1742 - RNA, 20 nt, synthetic construct
  source 1..20: mol_type = other RNA
cagacttgaaaccagagaac

SEQ ID NO: 1743 - RNA, 20 nt, synthetic construct
  source 1..20: mol_type = other RNA
accagagaacatcctgtttg

SEQ ID NO: 1744 - RNA, 20 nt, synthetic construct
  source 1..20: mol_type = other RNA
ccagagaacatcctgtttgt

SEQ ID NO: 1745 - RNA, 20 nt, synthetic construct
  source 1..20: mol_type = other RNA
cagagaacatcctgtttgtg

SEQ ID NO: 1746 - RNA, 20 nt, synthetic construct
  source 1..20: mol_type = other RNA
agagaacatcctgtttgtga

SEQ ID NO: 1747 - RNA, 20 nt, synthetic construct
  source 1..20: mol_type = other RNA
gagaacatcctgtttgtgaa

SEQ ID NO: 1748 - RNA, 20 nt, synthetic construct
  source 1..20: mol_type = other RNA
agaacatcctgtttgtgaat

SEQ ID NO: 1749 - RNA, 20 nt, synthetic construct
  source 1..20: mol_type = other RNA
gccctgaagatcatccgcaa

SEQ ID NO: 1750 - RNA, 20 nt, synthetic construct
  source 1..20: mol_type = other RNA
cctgaagatcatccgcaacg

SEQ ID NO: 1751 - RNA, 20 nt, synthetic construct
  source 1..20: mol_type = other RNA
ctgaagatcatccgcaacgt

SEQ ID NO: 1752 - RNA, 20 nt, synthetic construct
  source 1..20: mol_type = other RNA
tgaagatcatccgcaacgtg

SEQ ID NO: 1753 - RNA, 20 nt, synthetic construct
  source 1..20: mol_type = other RNA
tgccctgaagatcatccgca

SEQ ID NO: 1754 - RNA, 20 nt, synthetic construct
  source 1..20: mol_type = other RNA
ccctgaagatcatccgcaac

SEQ ID NO: 1755 - RNA, 20 nt, synthetic construct
  source 1..20: mol_type = other RNA
tgttgactttggaagtgcaa

SEQ ID NO: 1756 - RNA, 20 nt, synthetic construct
  source 1..20: mol_type = other RNA
ttgactttggaagtgcaacg

SEQ ID NO: 1757 - RNA, 20 nt, synthetic construct
  source 1..20: mol_type = other RNA
gttgactttggaagtgcaac

SEQ ID NO: 1758 - RNA, 20 nt, synthetic construct
  source 1..20: mol_type = other RNA
ttgttgactttggaagtgca

SEQ ID NO: 1759 - RNA, 20 nt, synthetic construct
  source 1..20: mol_type = other RNA
gttgttgactttggaagtgc

SEQ ID NO: 1760 - RNA, 20 nt, synthetic construct
  source 1..20: mol_type = other RNA
cagatctgaagcctgaaaat

SEQ ID NO: 1761 - RNA, 20 nt, synthetic construct
  source 1..20: mol_type = other RNA
acagatctgaagcctgaaaa

SEQ ID NO: 1762 - RNA, 20 nt, synthetic construct
  source 1..20: mol_type = other RNA
tacagatctgaagcctgaaa

SEQ ID NO: 1763 - RNA, 20 nt, synthetic construct
  source 1..20: mol_type = other RNA
atacagatctgaagcctgaa

SEQ ID NO: 1764 - RNA, 20 nt, synthetic construct
  source 1..20: mol_type = other RNA
catacagatctgaagcctga

SEQ ID NO: 1765 - RNA, 20 nt, synthetic construct
  source 1..20: mol_type = other RNA
caaacagaccccaactggtc

SEQ ID NO: 1766 - RNA, 20 nt, synthetic construct
  source 1..20: mol_type = other RNA
aaacagaccccaactggtcc

SEQ ID NO: 1767 - RNA, 20 nt, synthetic construct
  source 1..20: mol_type = other RNA
aacagaccccaactggtcca

SEQ ID NO: 1768 - RNA, 20 nt, synthetic construct
  source 1..20: mol_type = other RNA
acagaccccaactggtccaa

SEQ ID NO: 1769 - RNA, 20 nt, synthetic construct
  source 1..20: mol_type = other RNA
cagaccccaactggtccaac

SEQ ID NO: 1770 - RNA, 20 nt, synthetic construct
  source 1..20: mol_type = other RNA
ctggtccaacttcttctatg

SEQ ID NO: 1771 - RNA, 20 nt, synthetic construct
  source 1..20: mol_type = other RNA
tggtccaacttcttctatga

SEQ ID NO: 1772 - RNA, 20 nt, synthetic construct
  source 1..20: mol_type = other RNA
ggtccaacttcttctatgac

SEQ ID NO: 1773 - RNA, 20 nt, synthetic construct
  source 1..20: mol_type = other RNA
gtccaacttcttctatgacc

SEQ ID NO: 1774 - RNA, 20 nt, synthetic construct
  source 1..20: mol_type = other RNA
tccaacttcttctatgaccc

SEQ ID NO: 1775 - RNA, 20 nt, synthetic construct
  source 1..20: mol_type = other RNA
ccaacttcttctatgacccc

SEQ ID NO: 1776 - RNA, 20 nt, synthetic construct
  source 1..20: mol_type = other RNA
gccatgaagatccaggtagg

SEQ ID NO: 1777 - RNA, 20 nt, synthetic construct
  source 1..20: mol_type = other RNA
ccatgaagatccaggtaggc

SEQ ID NO: 1778 - RNA, 20 nt, synthetic construct
  source 1..20: mol_type = other RNA
ggccatgaagatccaggtag

SEQ ID NO: 1779 - RNA, 20 nt, synthetic construct
  source 1..20: mol_type = other RNA
catgaagatccaggtaggcg

SEQ ID NO: 1780 - RNA, 20 nt, synthetic construct
  source 1..20: mol_type = other RNA
atgaagatccaggtaggcgg

SEQ ID NO: 1781 - RNA, 20 nt, synthetic construct
  source 1..20: mol_type = other RNA
tgaagatccaggtaggcggc

SEQ ID NO: 1782 - RNA, 20 nt, synthetic construct
  source 1..20: mol_type = other RNA
ctggactttggtgcaagccg

SEQ ID NO: 1783 - RNA, 20 nt, synthetic construct
  source 1..20: mol_type = other RNA
gctggactttggtgcaagcc

SEQ ID NO: 1784 - RNA, 20 nt, synthetic construct
  source 1..20: mol_type = other RNA
tgctggactttggtgcaagc

SEQ ID NO: 1785 - RNA, 20 nt, synthetic construct
  source 1..20: mol_type = other RNA
tggactttggtgcaagccgg

SEQ ID NO: 1786 - RNA, 20 nt, synthetic construct
  source 1..20: mol_type = other RNA
ctgctggactttggtgcaag

SEQ ID NO: 1787 - RNA, 20 nt, synthetic construct
  source 1..20: mol_type = other RNA
ctgaccccaactgggccaac

SEQ ID NO: 1788 - RNA, 20 nt, synthetic construct
  source 1..20: mol_type = other RNA
actgaccccaactgggccaa

SEQ ID NO: 1789 - RNA, 20 nt, synthetic construct
  source 1..20: mol_type = other RNA
gactgaccccaactgggcca

SEQ ID NO: 1790 - RNA, 20 nt, synthetic construct
  source 1..20: mol_type = other RNA
agactgaccccaactgggcc

SEQ ID NO: 1791 - RNA, 20 nt, synthetic construct
  source 1..20: mol_type = other RNA
cagactgaccccaactgggc

SEQ ID NO: 1792 - RNA, 20 nt, synthetic construct
  source 1..20: mol_type = other RNA
tgggccaacttcctgtatga

SEQ ID NO: 1793 - RNA, 20 nt, synthetic construct
  source 1..20: mol_type = other RNA
ccaacttcctgtatgatgcc

SEQ ID NO: 1794 - RNA, 20 nt, synthetic construct
  source 1..20: mol_type = other RNA
gccaacttcctgtatgatgc

SEQ ID NO: 1795 - RNA, 20 nt, synthetic construct
  source 1..20: mol_type = other RNA
ggccaacttcctgtatgatg

SEQ ID NO: 1796 - RNA, 20 nt, synthetic construct
  source 1..20: mol_type = other RNA
gggccaacttcctgtatgat

SEQ ID NO: 1797 - RNA, 20 nt, synthetic construct
  source 1..20: mol_type = other RNA
ctgggccaacttcctgtatg

SEQ ID NO: 1798 - RNA, 20 nt, synthetic construct
  source 1..20: mol_type = other RNA
gtgaagatccaggtgagagg

SEQ ID NO: 1799 - RNA, 20 nt, synthetic construct
  source 1..20: mol_type = other RNA
cgtgaagatccaggtgagag

SEQ ID NO: 1800 - RNA, 20 nt, synthetic construct
  source 1..20: mol_type = other RNA
ccgtgaagatccaggtgaga

SEQ ID NO: 1801 - RNA, 20 nt, synthetic construct
  source 1..20: mol_type = other RNA
gccgtgaagatccaggtgag

SEQ ID NO: 1802 - RNA, 20 nt, synthetic construct
  source 1..20: mol_type = other RNA
tgaagatccaggtgagaggg

SEQ ID NO: 1803 - RNA, 20 nt, synthetic construct
  source 1..20: mol_type = other RNA
ggccgtgaagatccaggtga

SEQ ID NO: 1804 - RNA, 20 nt, synthetic construct
  source 1..20: mol_type = other RNA
ggggacttcgggctggctag

SEQ ID NO: 1805 - RNA, 20 nt, synthetic construct
  source 1..20: mol_type = other RNA
tggggacttcgggctggcta

SEQ ID NO: 1806 - RNA, 20 nt, synthetic construct
  source 1..20: mol_type = other RNA
ttggggacttcgggctggct

SEQ ID NO: 1807 - RNA, 20 nt, synthetic construct
  source 1..20: mol_type = other RNA
gggacttcgggctggctagg

SEQ ID NO: 1808 - RNA, 20 nt, synthetic construct
  source 1..20: mol_type = other RNA
attggggacttcgggctggc

SEQ ID NO: 1809 - RNA, 20 nt, synthetic construct
  source 1..20: mol_type = other RNA
cgggacgtggcagcgcgtaa

SEQ ID NO: 1810 - RNA, 20 nt, synthetic construct
  source 1..20: mol_type = other RNA
gggacgtggcagcgcgtaac

SEQ ID NO: 1811 - RNA, 20 nt, synthetic construct
  source 1..20: mol_type = other RNA
ccgggacgtggcagcgcgta

SEQ ID NO: 1812 - RNA, 20 nt, synthetic construct
  source 1..20: mol_type = other RNA
accgggacgtggcagcgcgt

SEQ ID NO: 1813 - RNA, 20 nt, synthetic construct
  source 1..20: mol_type = other RNA
caccgggacgtggcagcgcg

SEQ ID NO: 1814 - RNA, 20 nt, synthetic construct
  source 1..20: mol_type = other RNA
gtaacgtgctgttgaccaat

SEQ ID NO: 1815 - RNA, 20 nt, synthetic construct
  source 1..20: mol_type = other RNA
cgtaacgtgctgttgaccaa

SEQ ID NO: 1816 - RNA, 20 nt, synthetic construct
  source 1..20: mol_type = other RNA
gcgtaacgtgctgttgacca

SEQ ID NO: 1817 - RNA, 20 nt, synthetic construct
  source 1..20: mol_type = other RNA
cgcgtaacgtgctgttgacc

SEQ ID NO: 1818 - RNA, 20 nt, synthetic construct
  source 1..20: mol_type = other RNA
gcgcgtaacgtgctgttgac

SEQ ID NO: 1819 - RNA, 20 nt, synthetic construct
  source 1..20: mol_type = other RNA
agcgcgtaacgtgctgttga

SEQ ID NO: 1820 - RNA, 20 nt, synthetic construct
  source 1..20: mol_type = other RNA
tgaagatgctgaagtgtgag

SEQ ID NO: 1821 - RNA, 20 nt, synthetic construct
  source 1..20: mol_type = other RNA
tgtgaagatgctgaagtgtg

SEQ ID NO: 1822 - RNA, 20 nt, synthetic construct
  source 1..20: mol_type = other RNA
gctgtgaagatgctgaagtg

SEQ ID NO: 1823 - RNA, 20 nt, synthetic construct
  source 1..20: mol_type = other RNA
gtgaagatgctgaagtgtga

SEQ ID NO: 1824 - RNA, 20 nt, synthetic construct
  source 1..20: mol_type = other RNA
ctgtgaagatgctgaagtgt

SEQ ID NO: 1825 - RNA, 20 nt, synthetic construct
  source 1..20: mol_type = other RNA
ggctgtgaagatgctgaagt

SEQ ID NO: 1826 - RNA, 20 nt, synthetic construct
  source 1..20: mol_type = other RNA
cagcgactttggtctcacca

SEQ ID NO: 1827 - RNA, 20 nt, synthetic construct
  source 1..20: mol_type = other RNA
agcgactttggtctcaccaa

SEQ ID NO: 1828 - RNA, 20 nt, synthetic construct
  source 1..20: mol_type = other RNA
gtcagcgactttggtctcac

SEQ ID NO: 1829 - RNA, 20 nt, synthetic construct
  source 1..20: mol_type = other RNA
tcagcgactttggtctcacc

SEQ ID NO: 1830 - RNA, 20 nt, synthetic construct
  source 1..20: mol_type = other RNA
gcgactttggtctcaccaag

SEQ ID NO: 1831 - RNA, 20 nt, synthetic construct
  source 1..20: mol_type = other RNA
cgagacctggctgcccgcaa

SEQ ID NO: 1832 - RNA, 20 nt, synthetic construct
  source 1..20: mol_type = other RNA
catcgagacctggctgcccg

SEQ ID NO: 1833 - RNA, 20 nt, synthetic construct
  source 1..20: mol_type = other RNA
atcgagacctggctgcccgc

SEQ ID NO: 1834 - RNA, 20 nt, synthetic construct
  source 1..20: mol_type = other RNA
tcgagacctggctgcccgca

SEQ ID NO: 1835 - RNA, 20 nt, synthetic construct
  source 1..20: mol_type = other RNA
gagacctggctgcccgcaat

SEQ ID NO: 1836 - RNA, 20 nt, synthetic construct
  source 1..20: mol_type = other RNA
gcccgcaatgtgctggtgtc

SEQ ID NO: 1837 - RNA, 20 nt, synthetic construct
  source 1..20: mol_type = other RNA
ccgcaatgtgctggtgtctg

SEQ ID NO: 1838 - RNA, 20 nt, synthetic construct
  source 1..20: mol_type = other RNA
cgcaatgtgctggtgtctga

SEQ ID NO: 1839 - RNA, 20 nt, synthetic construct
  source 1..20: mol_type = other RNA
tgcccgcaatgtgctggtgt

SEQ ID NO: 1840 - RNA, 20 nt, synthetic construct
  source 1..20: mol_type = other RNA
cccgcaatgtgctggtgtct

SEQ ID NO: 1841 - RNA, 20 nt, synthetic construct
  source 1..20: mol_type = other RNA
gcaatgtgctggtgtctgag

SEQ ID NO: 1842 - RNA, 20 nt, synthetic construct
  source 1..20: mol_type = other RNA
gccgtcaagtgcattaagaa

SEQ ID NO: 1843 - RNA, 20 nt, synthetic construct
  source 1..20: mol_type = other RNA
gtcaagtgcattaagaacga

SEQ ID NO: 1844 - RNA, 20 nt, synthetic construct
  source 1..20: mol_type = other RNA
cgccgtcaagtgcattaaga

SEQ ID NO: 1845 - RNA, 20 nt, synthetic construct
  source 1..20: mol_type = other RNA
ccgtcaagtgcattaagaac

SEQ ID NO: 1846 - RNA, 20 nt, synthetic construct
  source 1..20: mol_type = other RNA
cgtcaagtgcattaagaacg

SEQ ID NO: 1847 - RNA, 20 nt, synthetic construct
  source 1..20: mol_type = other RNA
tcaagtgcattaagaacgac

SEQ ID NO: 1848 - RNA, 20 nt, synthetic construct
  source 1..20: mol_type = other RNA
agagacattaaaccagataa

SEQ ID NO: 1849 - RNA, 20 nt, synthetic construct
  source 1..20: mol_type = other RNA
cagagacattaaaccagata

SEQ ID NO: 1850 - RNA, 20 nt, synthetic construct
  source 1..20: mol_type = other RNA
acagagacattaaaccagat

SEQ ID NO: 1851 - RNA, 20 nt, synthetic construct
  source 1..20: mol_type = other RNA
cacagagacattaaaccaga

SEQ ID NO: 1852 - RNA, 20 nt, synthetic construct
  source 1..20: mol_type = other RNA
gagacattaaaccagataac

SEQ ID NO: 1853 - RNA, 20 nt, synthetic construct
  source 1..20: mol_type = other RNA
ataacttcctaatgggtatt

SEQ ID NO: 1854 - RNA, 20 nt, synthetic construct
  source 1..20: mol_type = other RNA
gataacttcctaatgggtat

SEQ ID NO: 1855 - RNA, 20 nt, synthetic construct
  source 1..20: mol_type = other RNA
agataacttcctaatgggta

SEQ ID NO: 1856 - RNA, 20 nt, synthetic construct
  source 1..20: mol_type = other RNA
cagataacttcctaatgggt

SEQ ID NO: 1857 - RNA, 20 nt, synthetic construct
  source 1..20: mol_type = other RNA
ccagataacttcctaatggg

SEQ ID NO: 1858 - RNA, 20 nt, synthetic construct
  source 1..20: mol_type = other RNA
accagataacttcctaatgg

SEQ ID NO: 1859 - RNA, 20 nt, synthetic construct
  source 1..20: mol_type = other RNA
gtgaagctagaatctcagaa

SEQ ID NO: 1860 - RNA, 20 nt, synthetic construct
  source 1..20: mol_type = other RNA
agtgaagctagaatctcaga

SEQ ID NO: 1861 - RNA, 20 nt, synthetic construct
  source 1..20: mol_type = other RNA
ggcagtgaagctagaatctc

SEQ ID NO: 1862 - RNA, 20 nt, synthetic construct
  source 1..20: mol_type = other RNA
tgaagctagaatctcagaag

SEQ ID NO: 1863 - RNA, 20 nt, synthetic construct
  source 1..20: mol_type = other RNA
cagtgaagctagaatctcag

SEQ ID NO: 1864 - RNA, 20 nt, synthetic construct
  source 1..20: mol_type = other RNA
gcagtgaagctagaatctca

SEQ ID NO: 1865 - RNA, 20 nt, synthetic construct
  source 1..20: mol_type = other RNA
cgagacattaaaccagataa

SEQ ID NO: 1866 - RNA, 20 nt, synthetic construct
  source 1..20: mol_type = other RNA
ccgagacattaaaccagata

SEQ ID NO: 1867 - RNA, 20 nt, synthetic construct
  source 1..20: mol_type = other RNA
accgagacattaaaccagat

SEQ ID NO: 1868 - RNA, 20 nt, synthetic construct
  source 1..20: mol_type = other RNA
caccgagacattaaaccaga

SEQ ID NO: 1869 - RNA, 20 nt, synthetic construct
  source 1..20: mol_type = other RNA
ataacttcctgatgggtact

SEQ ID NO: 1870 - RNA, 20 nt, synthetic construct
  source 1..20: mol_type = other RNA
gataacttcctgatgggtac

SEQ ID NO: 1871 - RNA, 20 nt, synthetic construct
  source 1..20: mol_type = other RNA
agataacttcctgatgggta

SEQ ID NO: 1872 - RNA, 20 nt, synthetic construct
  source 1..20: mol_type = other RNA
cagataacttcctgatgggt

SEQ ID NO: 1873 - RNA, 20 nt, synthetic construct
  source 1..20: mol_type = other RNA
ccagataacttcctgatggg

SEQ ID NO: 1874 - RNA, 20 nt, synthetic construct
  source 1..20: mol_type = other RNA
accagataacttcctgatgg

SEQ ID NO: 1875 - RNA, 20 nt, synthetic construct
  source 1..20: mol_type = other RNA
gtgaagctggaatctcagaa

SEQ ID NO: 1876 - RNA, 20 nt, synthetic construct
  source 1..20: mol_type = other RNA
agtgaagctggaatctcaga

SEQ ID NO: 1877 - RNA, 20 nt, synthetic construct
  source 1..20: mol_type = other RNA
agcagtgaagctggaatctc

SEQ ID NO: 1878 - RNA, 20 nt, synthetic construct
  source 1..20: mol_type = other RNA
tgaagctggaatctcagaag

SEQ ID NO: 1879 - RNA, 20 nt, synthetic construct
  source 1..20: mol_type = other RNA
cagtgaagctggaatctcag

SEQ ID NO: 1880 - RNA, 20 nt, synthetic construct
  source 1..20: mol_type = other RNA
gcagtgaagctggaatctca

SEQ ID NO: 1881 - RNA, 20 nt, synthetic construct
  source 1..20: mol_type = other RNA
catcgacttcgggctggcca

SEQ ID NO: 1882 - RNA, 20 nt, synthetic construct
  source 1..20: mol_type = other RNA
atcgacttcgggctggccaa

SEQ ID NO: 1883 - RNA, 20 nt, synthetic construct
  source 1..20: mol_type = other RNA
atcatcgacttcgggctggc

SEQ ID NO: 1884 - RNA, 20 nt, synthetic construct
  source 1..20: mol_type = other RNA
tcatcgacttcgggctggcc

SEQ ID NO: 1885 - RNA, 20 nt, synthetic construct
  source 1..20: mol_type = other RNA
tcgacttcgggctggccaag

SEQ ID NO: 1886 - RNA, 20 nt, synthetic construct
  source 1..20: mol_type = other RNA
gggatgtgaagccagacaac

SEQ ID NO: 1887 - RNA, 20 nt, synthetic construct
  source 1..20: mol_type = other RNA
cgggatgtgaagccagacaa

SEQ ID NO: 1888 - RNA, 20 nt, synthetic construct
  source 1..20: mol_type = other RNA
ccgggatgtgaagccagaca

SEQ ID NO: 1889 - RNA, 20 nt, synthetic construct
  source 1..20: mol_type = other RNA
accgggatgtgaagccagac

SEQ ID NO: 1890 - RNA, 20 nt, synthetic construct
  source 1..20: mol_type = other RNA
caccgggatgtgaagccaga

SEQ ID NO: 1891 - RNA, 20 nt, synthetic construct
  source 1..20: mol_type = other RNA
acaacttcctcatgggcctg

SEQ ID NO: 1892 - RNA, 20 nt, synthetic construct
  source 1..20: mol_type = other RNA
gacaacttcctcatgggcct

SEQ ID NO: 1893 - RNA, 20 nt, synthetic construct
  source 1..20: mol_type = other RNA
agacaacttcctcatgggcc

SEQ ID NO: 1894 - RNA, 20 nt, synthetic construct
  source 1..20: mol_type = other RNA
cagacaacttcctcatgggc

SEQ ID NO: 1895 - RNA, 20 nt, synthetic construct
  source 1..20: mol_type = other RNA
ccagacaacttcctcatggg

SEQ ID NO: 1896 - RNA, 20 nt, synthetic construct
  source 1..20: mol_type = other RNA
gccagacaacttcctcatgg

SEQ ID NO: 1897 - RNA, 20 nt, synthetic construct
  source 1..20: mol_type = other RNA
tcaagcttgaatgtgtcaaa

SEQ ID NO: 1898 - RNA, 20 nt, synthetic construct
  source 1..20: mol_type = other RNA
atcaagcttgaatgtgtcaa

SEQ ID NO: 1899 - RNA, 20 nt, synthetic construct
  source 1..20: mol_type = other RNA
catcaagcttgaatgtgtca

SEQ ID NO: 1900 - RNA, 20 nt, synthetic construct
  source 1..20: mol_type = other RNA
ccatcaagcttgaatgtgtc

SEQ ID NO: 1901 - RNA, 20 nt, synthetic construct
  source 1..20: mol_type = other RNA
gccatcaagcttgaatgtgt

SEQ ID NO: 1902 - RNA, 20 nt, synthetic construct
  source 1..20: mol_type = other RNA
tgccatcaagcttgaatgtg

SEQ ID NO: 1903 - RNA, 20 nt, synthetic construct
  source 1..20: mol_type = other RNA
catcgacttcggcctggcca

SEQ ID NO: 1904 - RNA, 20 nt, synthetic construct
  source 1..20: mol_type = other RNA
tcgacttcggcctggccaag

SEQ ID NO: 1905 - RNA, 20 nt, synthetic construct
  source 1..20: mol_type = other RNA
atcgacttcggcctggccaa

SEQ ID NO: 1906 - RNA, 20 nt, synthetic construct
  source 1..20: mol_type = other RNA
tcatcgacttcggcctggcc

SEQ ID NO: 1907 - RNA, 20 nt, synthetic construct
  source 1..20: mol_type = other RNA
atcatcgacttcggcctggc

SEQ ID NO: 1908 - RNA, 20 nt, synthetic construct
  source 1..20: mol_type = other RNA
gggacgtcaagcccgacaac

SEQ ID NO: 1909 - RNA, 20 nt, synthetic construct
  source 1..20: mol_type = other RNA
cgggacgtcaagcccgacaa

SEQ ID NO: 1910 - RNA, 20 nt, synthetic construct
  source 1..20: mol_type = other RNA
ccgggacgtcaagcccgaca

SEQ ID NO: 1911 - RNA, 20 nt, synthetic construct
  source 1..20: mol_type = other RNA
accgggacgtcaagcccgac

SEQ ID NO: 1912 - RNA, 20 nt, synthetic construct
  source 1..20: mol_type = other RNA
caccgggacgtcaagcccga

SEQ ID NO: 1913 - RNA, 20 nt, synthetic construct
  source 1..20: mol_type = other RNA
acaacttcctcatggggctg

SEQ ID NO: 1914 - RNA, 20 nt, synthetic construct
  source 1..20: mol_type = other RNA
gacaacttcctcatggggct

SEQ ID NO: 1915 - RNA, 20 nt, synthetic construct
  source 1..20: mol_type = other RNA
cgacaacttcctcatggggc

SEQ ID NO: 1916 - RNA, 20 nt, synthetic construct
  source 1..20: mol_type = other RNA
gcccgacaacttcctcatgg

SEQ ID NO: 1917 - RNA, 20 nt, synthetic construct
  source 1..20: mol_type = other RNA
ccgacaacttcctcatgggg

SEQ ID NO: 1918 - RNA, 20 nt, synthetic construct
  source 1..20: mol_type = other RNA
cccgacaacttcctcatggg

SEQ ID NO: 1919 - RNA, 20 nt, synthetic construct
  source 1..20: mol_type = other RNA
catcaagctggagtgtgtga

SEQ ID NO: 1920 - RNA, 20 nt, synthetic construct
  source 1..20: mol_type = other RNA
cgccatcaagctggagtgtg

SEQ ID NO: 1921 - RNA, 20 nt, synthetic construct
  source 1..20: mol_type = other RNA
tcaagctggagtgtgtgaag

SEQ ID NO: 1922 - RNA, 20 nt, synthetic construct
  source 1..20: mol_type = other RNA
atcaagctggagtgtgtgaa

SEQ ID NO: 1923 - RNA, 20 nt, synthetic construct
  source 1..20: mol_type = other RNA
ccatcaagctggagtgtgtg

SEQ ID NO: 1924 - RNA, 20 nt, synthetic construct
  source 1..20: mol_type = other RNA
gccatcaagctggagtgtgt

SEQ ID NO: 1925 - RNA, 20 nt, synthetic construct
  source 1..20: mol_type = other RNA
atagactttggactggccaa

SEQ ID NO: 1926 - RNA, 20 nt, synthetic construct
  source 1..20: mol_type = other RNA
tatagactttggactggcca

SEQ ID NO: 1927 - RNA, 20 nt, synthetic construct
  source 1..20: mol_type = other RNA
tagactttggactggccaag

SEQ ID NO: 1928 - RNA, 20 nt, synthetic construct
  source 1..20: mol_type = other RNA
ttatagactttggactggcc

SEQ ID NO: 1929 - RNA, 20 nt, synthetic construct
  source 1..20: mol_type = other RNA
attatagactttggactggc

SEQ ID NO: 1930 - RNA, 20 nt, synthetic construct
  source 1..20: mol_type = other RNA
gagatgtcaagccagagaac

SEQ ID NO: 1931 - RNA, 20 nt, synthetic construct
  source 1..20: mol_type = other RNA
cgagatgtcaagccagagaa

SEQ ID NO: 1932 - RNA, 20 nt, synthetic construct
  source 1..20: mol_type = other RNA
ccgagatgtcaagccagaga

SEQ ID NO: 1933 - RNA, 20 nt, synthetic construct
  source 1..20: mol_type = other RNA
accgagatgtcaagccagag

SEQ ID NO: 1934 - RNA, 20 nt, synthetic construct
  source 1..20: mol_type = other RNA
taccgagatgtcaagccaga

SEQ ID NO: 1935 - RNA, 20 nt, synthetic construct
  source 1..20: mol_type = other RNA
cagagaacttcctgattggt

SEQ ID NO: 1936 - RNA, 20 nt, synthetic construct
  source 1..20: mol_type = other RNA
agaacttcctgattggtcga

SEQ ID NO: 1937 - RNA, 20 nt, synthetic construct
  source 1..20: mol_type = other RNA
gagaacttcctgattggtcg

SEQ ID NO: 1938 - RNA, 20 nt, synthetic construct
  source 1..20: mol_type = other RNA
agagaacttcctgattggtc

SEQ ID NO: 1939 - RNA, 20 nt, synthetic construct
  source 1..20: mol_type = other RNA
ccagagaacttcctgattgg

SEQ ID NO: 1940 - RNA, 20 nt, synthetic construct
  source 1..20: mol_type = other RNA
gccagagaacttcctgattg

SEQ ID NO: 1941 - RNA, 20 nt, synthetic construct
  source 1..20: mol_type = other RNA
tcaaactggtgagtagaatc

SEQ ID NO: 1942 - RNA, 20 nt, synthetic construct
  source 1..20: mol_type = other RNA
caaactggtgagtagaatct

SEQ ID NO: 1943 - RNA, 20 nt, synthetic construct
  source 1..20: mol_type = other RNA
atcaaactggtgagtagaat

SEQ ID NO: 1944 - RNA, 20 nt, synthetic construct
  source 1..20: mol_type = other RNA
aatcaaactggtgagtagaa

SEQ ID NO: 1945 - RNA, 20 nt, synthetic construct
  source 1..20: mol_type = other RNA
caatcaaactggtgagtaga

SEQ ID NO: 1946 - RNA, 20 nt, synthetic construct
  source 1..20: mol_type = other RNA
gcaatcaaactggtgagtag

SEQ ID NO: 1947 - RNA, 20 nt, synthetic construct
  source 1..20: mol_type = other RNA
agcaatcaaactggtgagta

SEQ ID NO: 1948 - RNA, 20 nt, synthetic construct
  source 1..20: mol_type = other RNA
taccgggacgtgaagcccga

SEQ ID NO: 1949 - RNA, 20 nt, synthetic construct
  source 1..20: mol_type = other RNA
accgggacgtgaagcccgag

SEQ ID NO: 1950 - RNA, 20 nt, synthetic construct
  source 1..20: mol_type = other RNA
ccgggacgtgaagcccgaga

SEQ ID NO: 1951 - RNA, 20 nt, synthetic construct
  source 1..20: mol_type = other RNA
cgggacgtgaagcccgagaa

SEQ ID NO: 1952 - RNA, 20 nt, synthetic construct
  source 1..20: mol_type = other RNA
gggacgtgaagcccgagaac

SEQ ID NO: 1953 - RNA, 20 nt, synthetic construct
  source 1..20: mol_type = other RNA
ccgagaacttcctggtgggc

SEQ ID NO: 1954 - RNA, 20 nt, synthetic construct
  source 1..20: mol_type = other RNA
gcccgagaacttcctggtgg

SEQ ID NO: 1955 - RNA, 20 nt, synthetic construct
  source 1..20: mol_type = other RNA
cccgagaacttcctggtggg

SEQ ID NO: 1956 - RNA, 20 nt, synthetic construct
  source 1..20: mol_type = other RNA
cgagaacttcctggtgggcc

SEQ ID NO: 1957 - RNA, 20 nt, synthetic construct
  source 1..20: mol_type = other RNA
gagaacttcctggtgggccg

SEQ ID NO: 1958 - RNA, 20 nt, synthetic construct
  source 1..20: mol_type = other RNA
agaacttcctggtgggccgc

SEQ ID NO: 1959 - RNA, 20 nt, synthetic construct
  source 1..20: mol_type = other RNA
ggctatcaaattggtgagtc

SEQ ID NO: 1960 - RNA, 20 nt, synthetic construct
  source 1..20: mol_type = other RNA
gctatcaaattggtgagtcg

SEQ ID NO: 1961 - RNA, 20 nt, synthetic construct
  source 1..20: mol_type = other RNA
ctatcaaattggtgagtcgg

SEQ ID NO: 1962 - RNA, 20 nt, synthetic construct
  source 1..20: mol_type = other RNA
tatcaaattggtgagtcggc

SEQ ID NO: 1963 - RNA, 20 nt, synthetic construct
  source 1..20: mol_type = other RNA
atcaaattggtgagtcggcc

SEQ ID NO: 1964 - RNA, 20 nt, synthetic construct
  source 1..20: mol_type = other RNA
tcaaattggtgagtcggccc

SEQ ID NO: 1965 - RNA, 20 nt, synthetic construct
  source 1..20: mol_type = other RNA
caaattggtgagtcggcccc

SEQ ID NO: 1966 - RNA, 20 nt, synthetic construct
  source 1..20: mol_type = other RNA
tacagagatgtaaaacctga

SEQ ID NO: 1967 - RNA, 20 nt, synthetic construct
  source 1..20: mol_type = other RNA
acagagatgtaaaacctgag

SEQ ID NO: 1968 - RNA, 20 nt, synthetic construct
  source 1..20: mol_type = other RNA
cagagatgtaaaacctgaga

SEQ ID NO: 1969 - RNA, 20 nt, synthetic construct
  source 1..20: mol_type = other RNA
agagatgtaaaacctgagaa

SEQ ID NO: 1970 - RNA, 20 nt, synthetic construct
  source 1..20: mol_type = other RNA
gagatgtaaaacctgagaac

SEQ ID NO: 1971 - RNA, 20 nt, synthetic construct
  source 1..20: mol_type = other RNA
ctgagaacttcttaatagga

SEQ ID NO: 1972 - RNA, 20 nt, synthetic construct
  source 1..20: mol_type = other RNA
acctgagaacttcttaatag

SEQ ID NO: 1973 - RNA, 20 nt, synthetic construct
  source 1..20: mol_type = other RNA
cctgagaacttcttaatagg

SEQ ID NO: 1974 - RNA, 20 nt, synthetic construct
  source 1..20: mol_type = other RNA
tgagaacttcttaataggac

SEQ ID NO: 1975 - RNA, 20 nt, synthetic construct
  source 1..20: mol_type = other RNA
gagaacttcttaataggacg

SEQ ID NO: 1976 - RNA, 20 nt, synthetic construct
  source 1..20: mol_type = other RNA
agaacttcttaataggacga

SEQ ID NO: 1977 - RNA, 20 nt, synthetic construct
  source 1..20: mol_type = other RNA
caattaagttggtaagttcc

SEQ ID NO: 1978 - RNA, 20 nt, synthetic construct
  source 1..20: mol_type = other RNA
ggcaattaagttggtaagtt

SEQ ID NO: 1979 - RNA, 20 nt, synthetic construct
  source 1..20: mol_type = other RNA
gcaattaagttggtaagttc

SEQ ID NO: 1980 - RNA, 20 nt, synthetic construct
  source 1..20: mol_type = other RNA
aattaagttggtaagttcct

SEQ ID NO: 1981 - RNA, 20 nt, synthetic construct
  source 1..20: mol_type = other RNA
attaagttggtaagttcctg

SEQ ID NO: 1982 - RNA, 20 nt, synthetic construct
  source 1..20: mol_type = other RNA
ttaagttggtaagttcctgt

SEQ ID NO: 1983 - RNA, 20 nt, synthetic construct
  source 1..20: mol_type = other RNA
aatagactggggtttggctg

SEQ ID NO: 1984 - RNA, 20 nt, synthetic construct
  source 1..20: mol_type = other RNA
ctaatagactggggtttggc

SEQ ID NO: 1985 - RNA, 20 nt, synthetic construct
  source 1..20: mol_type = other RNA
tagactggggtttggctgag

SEQ ID NO: 1986 - RNA, 20 nt, synthetic construct
  source 1..20: mol_type = other RNA
atagactggggtttggctga

SEQ ID NO: 1987 - RNA, 20 nt, synthetic construct
  source 1..20: mol_type = other RNA
taatagactggggtttggct

SEQ ID NO: 1988 - RNA, 20 nt, synthetic construct
  source 1..20: mol_type = other RNA
agagatgtcaagccccataa

SEQ ID NO: 1989 - RNA, 20 nt, synthetic construct
  source 1..20: mol_type = other RNA
gagatgtcaagccccataat

SEQ ID NO: 1990 - RNA, 20 nt, synthetic construct
  source 1..20: mol_type = other RNA
cagagatgtcaagccccata

SEQ ID NO: 1991 - RNA, 20 nt, synthetic construct
  source 1..20: mol_type = other RNA
acagagatgtcaagccccat

SEQ ID NO: 1992 - RNA, 20 nt, synthetic construct
  source 1..20: mol_type = other RNA
cacagagatgtcaagcccca

SEQ ID NO: 1993 - RNA, 20 nt, synthetic construct
  source 1..20: mol_type = other RNA
cataatgtcatgattgatca

SEQ ID NO: 1994 - RNA, 20 nt, synthetic construct
  source 1..20: mol_type = other RNA
ataatgtcatgattgatcat

SEQ ID NO: 1995 - RNA, 20 nt, synthetic construct
  source 1..20: mol_type = other RNA
ccataatgtcatgattgatc

SEQ ID NO: 1996 - RNA, 20 nt, synthetic construct
  source 1..20: mol_type = other RNA
cccataatgtcatgattgat

SEQ ID NO: 1997 - RNA, 20 nt, synthetic construct
  source 1..20: mol_type = other RNA
ccccataatgtcatgattga

SEQ ID NO: 1998 - RNA, 20 nt, synthetic construct
  source 1..20: mol_type = other RNA
gccccataatgtcatgattg

SEQ ID NO: 1999 - RNA, 20 nt, synthetic construct
  source 1..20: mol_type = other RNA
ttgttaaaattctcaaggtg

SEQ ID NO: 2000 - RNA, 20 nt, synthetic construct
  source 1..20: mol_type = other RNA
tgttgttaaaattctcaagg

SEQ ID NO: 2001 - RNA, 20 nt, synthetic construct
  source 1..20: mol_type = other RNA
taaaattctcaaggtgagta

SEQ ID NO: 2002 - RNA, 20 nt, synthetic construct
  source 1..20: mol_type = other RNA
ttaaaattctcaaggtgagt

SEQ ID NO: 2003 - RNA, 20 nt, synthetic construct
  source 1..20: mol_type = other RNA
gttaaaattctcaaggtgag

SEQ ID NO: 2004 - RNA, 20 nt, synthetic construct
  source 1..20: mol_type = other RNA
tgttaaaattctcaaggtga

SEQ ID NO: 2005 - RNA, 20 nt, synthetic construct
  source 1..20: mol_type = other RNA
gttgttaaaattctcaaggt

SEQ ID NO: 2006 - RNA, 20 nt, synthetic construct
  source 1..20: mol_type = other RNA
ctgatagattggggtctggc

SEQ ID NO: 2007 - RNA, 20 nt, synthetic construct
  source 1..20: mol_type = other RNA
tagattggggtctggcagaa

SEQ ID NO: 2008 - RNA, 20 nt, synthetic construct
  source 1..20: mol_type = other RNA
atagattggggtctggcaga

SEQ ID NO: 2009 - RNA, 20 nt, synthetic construct
  source 1..20: mol_type = other RNA
gatagattggggtctggcag

SEQ ID NO: 2010 - RNA, 20 nt, synthetic construct
  source 1..20: mol_type = other RNA
tgatagattggggtctggca

SEQ ID NO: 2011 - RNA, 20 nt, synthetic construct
  source 1..20: mol_type = other RNA
agggatgtgaaacctcacaa

SEQ ID NO: 2012 - RNA, 20 nt, synthetic construct
  source 1..20: mol_type = other RNA
gggatgtgaaacctcacaat

SEQ ID NO: 2013 - RNA, 20 nt, synthetic construct
  source 1..20: mol_type = other RNA
cagggatgtgaaacctcaca

SEQ ID NO: 2014 - RNA, 20 nt, synthetic construct
  source 1..20: mol_type = other RNA
acagggatgtgaaacctcac

SEQ ID NO: 2015 - RNA, 20 nt, synthetic construct
  source 1..20: mol_type = other RNA
cacagggatgtgaaacctca

SEQ ID NO: 2016 - RNA, 20 nt, synthetic construct
  source 1..20: mol_type = other RNA
acaatgtcatgatagatcac

SEQ ID NO: 2017 - RNA, 20 nt, synthetic construct
  source 1..20: mol_type = other RNA
cacaatgtcatgatagatca

SEQ ID NO: 2018 - RNA, 20 nt, synthetic construct
  source 1..20: mol_type = other RNA
tcacaatgtcatgatagatc

SEQ ID NO: 2019 - RNA, 20 nt, synthetic construct
  source 1..20: mol_type = other RNA
ctcacaatgtcatgatagat

SEQ ID NO: 2020 - RNA, 20 nt, synthetic construct
  source 1..20: mol_type = other RNA
cctcacaatgtcatgataga

SEQ ID NO: 2021 - RNA, 20 nt, synthetic construct
  source 1..20: mol_type = other RNA
acctcacaatgtcatgatag

SEQ ID NO: 2022 - RNA, 20 nt, synthetic construct
  source 1..20: mol_type = other RNA
gttgttaaaattctcaagcc

SEQ ID NO: 2023 - RNA, 20 nt, synthetic construct
  source 1..20: mol_type = other RNA
taaaattctcaagccagtaa

SEQ ID NO: 2024 - RNA, 20 nt, synthetic construct
  source 1..20: mol_type = other RNA
ttaaaattctcaagccagta

SEQ ID NO: 2025 - RNA, 20 nt, synthetic construct
  source 1..20: mol_type = other RNA
gttaaaattctcaagccagt

SEQ ID NO: 2026 - RNA, 20 nt, synthetic construct
  source 1..20: mol_type = other RNA
tgttaaaattctcaagccag

SEQ ID NO: 2027 - RNA, 20 nt, synthetic construct
  source 1..20: mol_type = other RNA
ttgttaaaattctcaagcca

SEQ ID NO: 2028 - RNA, 20 nt, synthetic construct
  source 1..20: mol_type = other RNA
tgttgttaaaattctcaagc

SEQ ID NO: 2029 - RNA, 20 nt, synthetic construct
  source 1..20: mol_type = other RNA
atcattgactttgggttggc

SEQ ID NO: 2030 - RNA, 20 nt, synthetic construct
  source 1..20: mol_type = other RNA
tcattgactttgggttggcc

SEQ ID NO: 2031 - RNA, 20 nt, synthetic construct
  source 1..20: mol_type = other RNA
cattgactttgggttggccc

SEQ ID NO: 2032 - RNA, 20 nt, synthetic construct
  source 1..20: mol_type = other RNA
attgactttgggttggccca

SEQ ID NO: 2033 - RNA, 20 nt, synthetic construct
  source 1..20: mol_type = other RNA
ttgactttgggttggcccat

SEQ ID NO: 2034 - RNA, 20 nt, synthetic construct
  source 1..20: mol_type = other RNA
cactttgatcttaaggtacg

SEQ ID NO: 2035 - RNA, 20 nt, synthetic construct
  source 1..20: mol_type = other RNA
actttgatcttaaggtacgt

SEQ ID NO: 2036 - RNA, 20 nt, synthetic construct
  source 1..20: mol_type = other RNA
ctttgatcttaaggtacgtt

SEQ ID NO: 2037 - RNA, 20 nt, synthetic construct
  source 1..20: mol_type = other RNA
tttgatcttaaggtacgttt

SEQ ID NO: 2038 - RNA, 20 nt, synthetic construct
  source 1..20: mol_type = other RNA
ttgatcttaaggtacgtttc

SEQ ID NO: 2039 - RNA, 20 nt, synthetic construct
  source 1..20: mol_type = other RNA
gcctgagaacataatgcttt

SEQ ID NO: 2040 - RNA, 20 nt, synthetic construct
  source 1..20: mol_type = other RNA
ccgccaaattcatcaagaaa

SEQ ID NO: 2041 - RNA, 20 nt, synthetic construct
  source 1..20: mol_type = other RNA
cgccaaattcatcaagaaaa

SEQ ID NO: 2042 - RNA, 20 nt, synthetic construct
  source 1..20: mol_type = other RNA
ccaaattcatcaagaaaagg

SEQ ID NO: 2043 - RNA, 20 nt, synthetic construct
  source 1..20: mol_type = other RNA
caaattcatcaagaaaagga

SEQ ID NO: 2044 - RNA, 20 nt, synthetic construct
  source 1..20: mol_type = other RNA
tgccgccaaattcatcaaga

SEQ ID NO: 2045 - RNA, 20 nt, synthetic construct
  source 1..20: mol_type = other RNA
gccgccaaattcatcaagaa

SEQ ID NO: 2046 - RNA, 20 nt, synthetic construct
  source 1..20: mol_type = other RNA
gccaaattcatcaagaaaag

SEQ ID NO: 2047 - RNA, 20 nt, synthetic construct
  source 1..20: mol_type = other RNA
attgactttggtctggctca

SEQ ID NO: 2048 - RNA, 20 nt, synthetic construct
  source 1..20: mol_type = other RNA
ttgactttggtctggctcac

SEQ ID NO: 2049 - RNA, 20 nt, synthetic construct
  source 1..20: mol_type = other RNA
gattgactttggtctggctc

SEQ ID NO: 2050 - RNA, 20 nt, synthetic construct
  source 1..20: mol_type = other RNA
tgattgactttggtctggct

SEQ ID NO: 2051 - RNA, 20 nt, synthetic construct
  source 1..20: mol_type = other RNA
ctgattgactttggtctggc

SEQ ID NO: 2052 - RNA, 20 nt, synthetic construct
  source 1..20: mol_type = other RNA
ttgatctcaaggtcagtaag

SEQ ID NO: 2053 - RNA, 20 nt, synthetic construct
  source 1..20: mol_type = other RNA
tttgatctcaaggtcagtaa

SEQ ID NO: 2054 - RNA, 20 nt, synthetic construct
  source 1..20: mol_type = other RNA
ctttgatctcaaggtcagta

SEQ ID NO: 2055 - RNA, 20 nt, synthetic construct
  source 1..20: mol_type = other RNA
actttgatctcaaggtcagt

SEQ ID NO: 2056 - RNA, 20 nt, synthetic construct
  source 1..20: mol_type = other RNA
cactttgatctcaaggtcag

SEQ ID NO: 2057 - RNA, 20 nt, synthetic construct
  source 1..20: mol_type = other RNA
ccagaaaacattatgttgtt

SEQ ID NO: 2058 - RNA, 20 nt, synthetic construct
  source 1..20: mol_type = other RNA
aaaacattatgttgttagac

SEQ ID NO: 2059 - RNA, 20 nt, synthetic construct
  source 1..20: mol_type = other RNA
gaaaacattatgttgttaga

SEQ ID NO: 2060 - RNA, 20 nt, synthetic construct
  source 1..20: mol_type = other RNA
agaaaacattatgttgttag

SEQ ID NO: 2061 - RNA, 20 nt, synthetic construct
  source 1..20: mol_type = other RNA
cagaaaacattatgttgtta

SEQ ID NO: 2062 - RNA, 20 nt, synthetic construct
  source 1..20: mol_type = other RNA
gccagaaaacattatgttgt

SEQ ID NO: 2063 - RNA, 20 nt, synthetic construct
  source 1..20: mol_type = other RNA
tgcagccaagttcatcaaga

SEQ ID NO: 2064 - RNA, 20 nt, synthetic construct
  source 1..20: mol_type = other RNA
ccaagttcatcaagaagcgg

SEQ ID NO: 2065 - RNA, 20 nt, synthetic construct
  source 1..20: mol_type = other RNA
agccaagttcatcaagaagc

SEQ ID NO: 2066 - RNA, 20 nt, synthetic construct
  source 1..20: mol_type = other RNA
cagccaagttcatcaagaag

SEQ ID NO: 2067 - RNA, 20 nt, synthetic construct
  source 1..20: mol_type = other RNA
gccaagttcatcaagaagcg

SEQ ID NO: 2068 - RNA, 20 nt, synthetic construct
  source 1..20: mol_type = other RNA
gcagccaagttcatcaagaa

SEQ ID NO: 2069 - RNA, 20 nt, synthetic construct
  source 1..20: mol_type = other RNA
tcgacttcggcatcgcgcac

SEQ ID NO: 2070 - RNA, 20 nt, synthetic construct
  source 1..20: mol_type = other RNA
atcgacttcggcatcgcgca

SEQ ID NO: 2071 - RNA, 20 nt, synthetic construct
  source 1..20: mol_type = other RNA
catcgacttcggcatcgcgc

SEQ ID NO: 2072 - RNA, 20 nt, synthetic construct
  source 1..20: mol_type = other RNA
tcatcgacttcggcatcgcg

SEQ ID NO: 2073 - RNA, 20 nt, synthetic construct
  source 1..20: mol_type = other RNA
ctcatcgacttcggcatcgc

SEQ ID NO: 2074 - RNA, 20 nt, synthetic construct
  source 1..20: mol_type = other RNA
tttgacctgaaggtgagccc

SEQ ID NO: 2075 - RNA, 20 nt, synthetic construct
  source 1..20: mol_type = other RNA
ttgacctgaaggtgagccct

SEQ ID NO: 2076 - RNA, 20 nt, synthetic construct
  source 1..20: mol_type = other RNA
ctttgacctgaaggtgagcc

SEQ ID NO: 2077 - RNA, 20 nt, synthetic construct
  source 1..20: mol_type = other RNA
actttgacctgaaggtgagc

SEQ ID NO: 2078 - RNA, 20 nt, synthetic construct
  source 1..20: mol_type = other RNA
cactttgacctgaaggtgag

SEQ ID NO: 2079 - RNA, 20 nt, synthetic construct
  source 1..20: mol_type = other RNA
ccggaaaacatcatgctgct

SEQ ID NO: 2080 - RNA, 20 nt, synthetic construct
  source 1..20: mol_type = other RNA
gccggaaaacatcatgctgc

SEQ ID NO: 2081 - RNA, 20 nt, synthetic construct
  source 1..20: mol_type = other RNA
aaaacatcatgctgctggac

SEQ ID NO: 2082 - RNA, 20 nt, synthetic construct
  source 1..20: mol_type = other RNA
gaaaacatcatgctgctgga

SEQ ID NO: 2083 - RNA, 20 nt, synthetic construct
  source 1..20: mol_type = other RNA
ggaaaacatcatgctgctgg

SEQ ID NO: 2084 - RNA, 20 nt, synthetic construct
  source 1..20: mol_type = other RNA
cggaaaacatcatgctgctg

SEQ ID NO: 2085 - RNA, 20 nt, synthetic construct
  source 1..20: mol_type = other RNA
ccaagttcatcaagaagcgc

SEQ ID NO: 2086 - RNA, 20 nt, synthetic construct
  source 1..20: mol_type = other RNA
cgcagccaagttcatcaaga

SEQ ID NO: 2087 - RNA, 20 nt, synthetic construct
  source 1..20: mol_type = other RNA
gtgactttggactggccacc

SEQ ID NO: 2088 - RNA, 20 nt, synthetic construct
  source 1..20: mol_type = other RNA
ggtgactttggactggccac

SEQ ID NO: 2089 - RNA, 20 nt, synthetic construct
  source 1..20: mol_type = other RNA
gggtgactttggactggcca

SEQ ID NO: 2090 - RNA, 20 nt, synthetic construct
  source 1..20: mol_type = other RNA
tgggtgactttggactggcc

SEQ ID NO: 2091 - RNA, 20 nt, synthetic construct
  source 1..20: mol_type = other RNA
ctgggtgactttggactggc

SEQ ID NO: 2092 - RNA, 20 nt, synthetic construct
  source 1..20: mol_type = other RNA
gtgatatcaagccagagaac

SEQ ID NO: 2093 - RNA, 20 nt, synthetic construct
  source 1..20: mol_type = other RNA
cgtgatatcaagccagagaa

SEQ ID NO: 2094 - RNA, 20 nt, synthetic construct
  source 1..20: mol_type = other RNA
ccgtgatatcaagccagaga

SEQ ID NO: 2095 - RNA, 20 nt, synthetic construct
  source 1..20: mol_type = other RNA
accgtgatatcaagccagag

SEQ ID NO: 2096 - RNA, 20 nt, synthetic construct
  source 1..20: mol_type = other RNA
caccgtgatatcaagccaga

SEQ ID NO: 2097 - RNA, 20 nt, synthetic construct
  source 1..20: mol_type = other RNA
cagagaacctgctggtaaga

SEQ ID NO: 2098 - RNA, 20 nt, synthetic construct
  source 1..20: mol_type = other RNA
ccagagaacctgctggtaag

SEQ ID NO: 2099 - RNA, 20 nt, synthetic construct
  source 1..20: mol_type = other RNA
agaacctgctggtaagagga

SEQ ID NO: 2100 - RNA, 20 nt, synthetic construct
  source 1..20: mol_type = other RNA
gagaacctgctggtaagagg

SEQ ID NO: 2101 - RNA, 20 nt, synthetic construct
  source 1..20: mol_type = other RNA
agagaacctgctggtaagag

SEQ ID NO: 2102 - RNA, 20 nt, synthetic construct
  source 1..20: mol_type = other RNA
gccagagaacctgctggtaa

SEQ ID NO: 2103 - RNA, 20 nt, synthetic construct
  source 1..20: mol_type = other RNA
ctctgaaaattatcaagaaa

SEQ ID NO: 2104 - RNA, 20 nt, synthetic construct
  source 1..20: mol_type = other RNA
gaaaattatcaagaaaagca

SEQ ID NO: 2105 - RNA, 20 nt, synthetic construct
  source 1..20: mol_type = other RNA
tgaaaattatcaagaaaagc

SEQ ID NO: 2106 - RNA, 20 nt, synthetic construct
  source 1..20: mol_type = other RNA
ctgaaaattatcaagaaaag

SEQ ID NO: 2107 - RNA, 20 nt, synthetic construct
  source 1..20: mol_type = other RNA
tctgaaaattatcaagaaaa

SEQ ID NO: 2108 - RNA, 20 nt, synthetic construct
  source 1..20: mol_type = other RNA
gctctgaaaattatcaagaa

SEQ ID NO: 2109 - RNA, 20 nt, synthetic construct
  source 1..20: mol_type = other RNA
tgctctgaaaattatcaaga

SEQ ID NO: 2110 - RNA, 20 nt, synthetic construct
  source 1..20: mol_type = other RNA
ggagactttgggcttgcgac

SEQ ID NO: 2111 - RNA, 20 nt, synthetic construct
  source 1..20: mol_type = other RNA
ctgggagactttgggcttgc

SEQ ID NO: 2112 - RNA, 20 nt, synthetic construct
  source 1..20: mol_type = other RNA
tgggagactttgggcttgcg

SEQ ID NO: 2113 - RNA, 20 nt, synthetic construct
  source 1..20: mol_type = other RNA
gggagactttgggcttgcga

SEQ ID NO: 2114 - RNA, 20 nt, synthetic construct
  source 1..20: mol_type = other RNA
gagactttgggcttgcgact

SEQ ID NO: 2115 - RNA, 20 nt, synthetic construct
  source 1..20: mol_type = other RNA
acagagacatcaaaccagag

SEQ ID NO: 2116 - RNA, 20 nt, synthetic construct
  source 1..20: mol_type = other RNA
cagagacatcaaaccagaga

SEQ ID NO: 2117 - RNA, 20 nt, synthetic construct
  source 1..20: mol_type = other RNA
agagacatcaaaccagagaa

SEQ ID NO: 2118 - RNA, 20 nt, synthetic construct
  source 1..20: mol_type = other RNA
gagacatcaaaccagagaat

SEQ ID NO: 2119 - RNA, 20 nt, synthetic construct
  source 1..20: mol_type = other RNA
accagagaatctcttggtat

SEQ ID NO: 2120 - RNA, 20 nt, synthetic construct
  source 1..20: mol_type = other RNA
ccagagaatctcttggtatg

SEQ ID NO: 2121 - RNA, 20 nt, synthetic construct
  source 1..20: mol_type = other RNA
cagagaatctcttggtatgt

SEQ ID NO: 2122 - RNA, 20 nt, synthetic construct
  source 1..20: mol_type = other RNA
agagaatctcttggtatgtc

SEQ ID NO: 2123 - RNA, 20 nt, synthetic construct
  source 1..20: mol_type = other RNA
gagaatctcttggtatgtca

SEQ ID NO: 2124 - RNA, 20 nt, synthetic construct
  source 1..20: mol_type = other RNA
agaatctcttggtatgtcat

SEQ ID NO: 2125 - RNA, 20 nt, synthetic construct
  source 1..20: mol_type = other RNA
gccctaaagattatagacaa

SEQ ID NO: 2126 - RNA, 20 nt, synthetic construct
  source 1..20: mol_type = other RNA
tgccctaaagattatagaca

SEQ ID NO: 2127 - RNA, 20 nt, synthetic construct
  source 1..20: mol_type = other RNA
ccctaaagattatagacaaa

SEQ ID NO: 2128 - RNA, 20 nt, synthetic construct
  source 1..20: mol_type = other RNA
cctaaagattatagacaaag

SEQ ID NO: 2129 - RNA, 20 nt, synthetic construct
  source 1..20: mol_type = other RNA
ctaaagattatagacaaagc

SEQ ID NO: 2130 - RNA, 20 nt, synthetic construct
  source 1..20: mol_type = other RNA
taaagattatagacaaagcc

SEQ ID NO: 2131 - RNA, 20 nt, synthetic construct
  source 1..20: mol_type = other RNA
gggacctcaagccggaaaac

SEQ ID NO: 2132 - RNA, 20 nt, synthetic construct
  source 1..20: mol_type = other RNA
cgggacctcaagccggaaaa

SEQ ID NO: 2133 - RNA, 20 nt, synthetic construct
  source 1..20: mol_type = other RNA
ccgggacctcaagccggaaa

SEQ ID NO: 2134 - RNA, 20 nt, synthetic construct
  source 1..20: mol_type = other RNA
accgggacctcaagccggaa

SEQ ID NO: 2135 - RNA, 20 nt, synthetic construct
  source 1..20: mol_type = other RNA
caccgggacctcaagccgga

SEQ ID NO: 2136 - RNA, 20 nt, synthetic construct
  source 1..20: mol_type = other RNA
tgaagatcattgacaagtcc

SEQ ID NO: 2137 - RNA, 20 nt, synthetic construct
  source 1..20: mol_type = other RNA
tgcgatgaagatcattgaca

SEQ ID NO: 2138 - RNA, 20 nt, synthetic construct
  source 1..20: mol_type = other RNA
atgaagatcattgacaagtc

SEQ ID NO: 2139 - RNA, 20 nt, synthetic construct
  source 1..20: mol_type = other RNA
gatgaagatcattgacaagt

SEQ ID NO: 2140 - RNA, 20 nt, synthetic construct
  source 1..20: mol_type = other RNA
cgatgaagatcattgacaag

SEQ ID NO: 2141 - RNA, 20 nt, synthetic construct
  source 1..20: mol_type = other RNA
gcgatgaagatcattgacaa

SEQ ID NO: 2142 - RNA, 20 nt, synthetic construct
  source 1..20: mol_type = other RNA
tcgcagactttggcatgagc

SEQ ID NO: 2143 - RNA, 20 nt, synthetic construct
  source 1..20: mol_type = other RNA
cgcagactttggcatgagcc

SEQ ID NO: 2144 - RNA, 20 nt, synthetic construct
  source 1..20: mol_type = other RNA
atcgcagactttggcatgag

SEQ ID NO: 2145 - RNA, 20 nt, synthetic construct
  source 1..20: mol_type = other RNA
gcagactttggcatgagccg

SEQ ID NO: 2146 - RNA, 20 nt, synthetic construct
  source 1..20: mol_type = other RNA
cagactttggcatgagccgg

SEQ ID NO: 2147 - RNA, 20 nt, synthetic construct
  source 1..20: mol_type = other RNA
gggacctggccacgcggaac

SEQ ID NO: 2148 - RNA, 20 nt, synthetic construct
  source 1..20: mol_type = other RNA
catcgggacctggccacgcg

SEQ ID NO: 2149 - RNA, 20 nt, synthetic construct
  source 1..20: mol_type = other RNA
atcgggacctggccacgcgg

SEQ ID NO: 2150 - RNA, 20 nt, synthetic construct
  source 1..20: mol_type = other RNA
tcgggacctggccacgcgga

SEQ ID NO: 2151 - RNA, 20 nt, synthetic construct
  source 1..20: mol_type = other RNA
cgggacctggccacgcggaa

SEQ ID NO: 2152 - RNA, 20 nt, synthetic construct
  source 1..20: mol_type = other RNA
cacgcggaactgcctagttg

SEQ ID NO: 2153 - RNA, 20 nt, synthetic construct
  source 1..20: mol_type = other RNA
acgcggaactgcctagttgg

SEQ ID NO: 2154 - RNA, 20 nt, synthetic construct
  source 1..20: mol_type = other RNA
cgcggaactgcctagttggg

SEQ ID NO: 2155 - RNA, 20 nt, synthetic construct
  source 1..20: mol_type = other RNA
gcggaactgcctagttgggg

SEQ ID NO: 2156 - RNA, 20 nt, synthetic construct
  source 1..20: mol_type = other RNA
cggaactgcctagttgggga

SEQ ID NO: 2157 - RNA, 20 nt, synthetic construct
  source 1..20: mol_type = other RNA
ggaactgcctagttggggaa

SEQ ID NO: 2158 - RNA, 20 nt, synthetic construct
  source 1..20: mol_type = other RNA
gctgtcaagatcttacggcc

SEQ ID NO: 2159 - RNA, 20 nt, synthetic construct
  source 1..20: mol_type = other RNA
gtcaagatcttacggccaga

SEQ ID NO: 2160 - RNA, 20 nt, synthetic construct
  source 1..20: mol_type = other RNA
agctgtcaagatcttacggc

SEQ ID NO: 2161 - RNA, 20 nt, synthetic construct
  source 1..20: mol_type = other RNA
ctgtcaagatcttacggcca

SEQ ID NO: 2162 - RNA, 20 nt, synthetic construct
  source 1..20: mol_type = other RNA
tgtcaagatcttacggccag

SEQ ID NO: 2163 - RNA, 20 nt, synthetic construct
  source 1..20: mol_type = other RNA
tcaagatcttacggccagat

SEQ ID NO: 2164 - RNA, 20 nt, synthetic construct
  source 1..20: mol_type = other RNA
tagctgactttggaatgagc

SEQ ID NO: 2165 - RNA, 20 nt, synthetic construct
  source 1..20: mol_type = other RNA
agctgactttggaatgagca

SEQ ID NO: 2166 - RNA, 20 nt, synthetic construct
  source 1..20: mol_type = other RNA
atagctgactttggaatgag

SEQ ID NO: 2167 - RNA, 20 nt, synthetic construct
  source 1..20: mol_type = other RNA
gctgactttggaatgagcag

SEQ ID NO: 2168 - RNA, 20 nt, synthetic construct
  source 1..20: mol_type = other RNA
ctgactttggaatgagcagg

SEQ ID NO: 2169 - RNA, 20 nt, synthetic construct
  source 1..20: mol_type = other RNA
gagatctggccacacgaaac

SEQ ID NO: 2170 - RNA, 20 nt, synthetic construct
  source 1..20: mol_type = other RNA
caccgagatctggccacacg

SEQ ID NO: 2171 - RNA, 20 nt, synthetic construct
  source 1..20: mol_type = other RNA
accgagatctggccacacga

SEQ ID NO: 2172 - RNA, 20 nt, synthetic construct
  source 1..20: mol_type = other RNA
ccgagatctggccacacgaa

SEQ ID NO: 2173 - RNA, 20 nt, synthetic construct
  source 1..20: mol_type = other RNA
cgagatctggccacacgaaa

SEQ ID NO: 2174 - RNA, 20 nt, synthetic construct
  source 1..20: mol_type = other RNA
acgaaactgtttagtgggta

SEQ ID NO: 2175 - RNA, 20 nt, synthetic construct
  source 1..20: mol_type = other RNA
cacacgaaactgtttagtgg

SEQ ID NO: 2176 - RNA, 20 nt, synthetic construct
  source 1..20: mol_type = other RNA
acacgaaactgtttagtggg

SEQ ID NO: 2177 - RNA, 20 nt, synthetic construct
  source 1..20: mol_type = other RNA
cacgaaactgtttagtgggt

SEQ ID NO: 2178 - RNA, 20 nt, synthetic construct
  source 1..20: mol_type = other RNA
cgaaactgtttagtgggtaa

SEQ ID NO: 2179 - RNA, 20 nt, synthetic construct
  source 1..20: mol_type = other RNA
gaaactgtttagtgggtaag

SEQ ID NO: 2180 - RNA, 20 nt, synthetic construct
  source 1..20: mol_type = other RNA
gctgtgaaaatgctccgagc

SEQ ID NO: 2181 - RNA, 20 nt, synthetic construct
  source 1..20: mol_type = other RNA
gtgaaaatgctccgagcaga

SEQ ID NO: 2182 - RNA, 20 nt, synthetic construct
  source 1..20: mol_type = other RNA
ggctgtgaaaatgctccgag

SEQ ID NO: 2183 - RNA, 20 nt, synthetic construct
  source 1..20: mol_type = other RNA
ctgtgaaaatgctccgagca

SEQ ID NO: 2184 - RNA, 20 nt, synthetic construct
  source 1..20: mol_type = other RNA
tgtgaaaatgctccgagcag

SEQ ID NO: 2185 - RNA, 20 nt, synthetic construct
  source 1..20: mol_type = other RNA
tgaaaatgctccgagcagat

SEQ ID NO: 2186 - RNA, 20 nt, synthetic construct
  source 1..20: mol_type = other RNA
gaaaatgctccgagcagatg

SEQ ID NO: 2187 - RNA, 20 nt, synthetic construct
  source 1..20: mol_type = other RNA
ccgacttcggctcttgcctc

SEQ ID NO: 2188 - RNA, 20 nt, synthetic construct
  source 1..20: mol_type = other RNA
gccgacttcggctcttgcct

SEQ ID NO: 2189 - RNA, 20 nt, synthetic construct
  source 1..20: mol_type = other RNA
ggccgacttcggctcttgcc

SEQ ID NO: 2190 - RNA, 20 nt, synthetic construct
  source 1..20: mol_type = other RNA
tggccgacttcggctcttgc

SEQ ID NO: 2191 - RNA, 20 nt, synthetic construct
  source 1..20: mol_type = other RNA
ctggccgacttcggctcttg

SEQ ID NO: 2192 - RNA, 20 nt, synthetic construct
  source 1..20: mol_type = other RNA
gggacatcaaacccgacaac

SEQ ID NO: 2193 - RNA, 20 nt, synthetic construct
  source 1..20: mol_type = other RNA
agggacatcaaacccgacaa

SEQ ID NO: 2194 - RNA, 20 nt, synthetic construct
  source 1..20: mol_type = other RNA
cagggacatcaaacccgaca

SEQ ID NO: 2195 - RNA, 20 nt, synthetic construct
  source 1..20: mol_type = other RNA
gcagggacatcaaacccgac

SEQ ID NO: 2196 - RNA, 20 nt, synthetic construct
  source 1..20: mol_type = other RNA
tgcagggacatcaaacccga

SEQ ID NO: 2197 - RNA, 20 nt, synthetic construct
  source 1..20: mol_type = other RNA
acaacatcctgctggaccgc

SEQ ID NO: 2198 - RNA, 20 nt, synthetic construct
  source 1..20: mol_type = other RNA
ccgacaacatcctgctggac

SEQ ID NO: 2199 - RNA, 20 nt, synthetic construct
  source 1..20: mol_type = other RNA
gacaacatcctgctggaccg

SEQ ID NO: 2200 - RNA, 20 nt, synthetic construct
  source 1..20: mol_type = other RNA
cgacaacatcctgctggacc

SEQ ID NO: 2201 - RNA, 20 nt, synthetic construct
  source 1..20: mol_type = other RNA
cccgacaacatcctgctgga

SEQ ID NO: 2202 - RNA, 20 nt, synthetic construct
  source 1..20: mol_type = other RNA
acccgacaacatcctgctgg

SEQ ID NO: 2203 - RNA, 20 nt, synthetic construct
  source 1..20: mol_type = other RNA
atgaagatcatgaacaagtg

SEQ ID NO: 2204 - RNA, 20 nt, synthetic construct
  source 1..20: mol_type = other RNA
catgaagatcatgaacaagt

SEQ ID NO: 2205 - RNA, 20 nt, synthetic construct
  source 1..20: mol_type = other RNA
ccatgaagatcatgaacaag

SEQ ID NO: 2206 - RNA, 20 nt, synthetic construct
  source 1..20: mol_type = other RNA
tgccatgaagatcatgaaca

SEQ ID NO: 2207 - RNA, 20 nt, synthetic construct
  source 1..20: mol_type = other RNA
tgaagatcatgaacaagtgg

SEQ ID NO: 2208 - RNA, 20 nt, synthetic construct
  source 1..20: mol_type = other RNA
gccatgaagatcatgaacaa

SEQ ID NO: 2209 - RNA, 20 nt, synthetic construct
  source 1..20: mol_type = other RNA
cactgacttaggattctgca

SEQ ID NO: 2210 - RNA, 20 nt, synthetic construct
  source 1..20: mol_type = other RNA
ctgacttaggattctgcaag

SEQ ID NO: 2211 - RNA, 20 nt, synthetic construct
  source 1..20: mol_type = other RNA
actgacttaggattctgcaa

SEQ ID NO: 2212 - RNA, 20 nt, synthetic construct
  source 1..20: mol_type = other RNA
tcactgacttaggattctgc

SEQ ID NO: 2213 - RNA, 20 nt, synthetic construct
  source 1..20: mol_type = other RNA
atcactgacttaggattctg

SEQ ID NO: 2214 - RNA, 20 nt, synthetic construct
  source 1..20: mol_type = other RNA
tcgtgatatcaaactgaaaa

SEQ ID NO: 2215 - RNA, 20 nt, synthetic construct
  source 1..20: mol_type = other RNA
atcgtgatatcaaactgaaa

SEQ ID NO: 2216 - RNA, 20 nt, synthetic construct
  source 1..20: mol_type = other RNA
catcgtgatatcaaactgaa

SEQ ID NO: 2217 - RNA, 20 nt, synthetic construct
  source 1..20: mol_type = other RNA
aaaatgtgctggtaagtaaa

SEQ ID NO: 2218 - RNA, 20 nt, synthetic construct
  source 1..20: mol_type = other RNA
ctcaaatcagttgtccctcc

SEQ ID NO: 2219 - RNA, 20 nt, synthetic construct
  source 1..20: mol_type = other RNA
caaatcagttgtccctccag

SEQ ID NO: 2220 - RNA, 20 nt, synthetic construct
  source 1..20: mol_type = other RNA
tcaaatcagttgtccctcca

SEQ ID NO: 2221 - RNA, 20 nt, synthetic construct
  source 1..20: mol_type = other RNA
cctcaaatcagttgtccctc

SEQ ID NO: 2222 - RNA, 20 nt, synthetic construct
  source 1..20: mol_type = other RNA
ccctcaaatcagttgtccct

SEQ ID NO: 2223 - RNA, 20 nt, synthetic construct
  source 1..20: mol_type = other RNA
gccctcaaatcagttgtccc

SEQ ID NO: 2224 - RNA, 20 nt, synthetic construct
  source 1..20: mol_type = other RNA
tgccctcaaatcagttgtcc

SEQ ID NO: 2225 - RNA, 20 nt, synthetic construct
  source 1..20: mol_type = other RNA
tagttgactttggcagttct

SEQ ID NO: 2226 - RNA, 20 nt, synthetic construct
  source 1..20: mol_type = other RNA
atagttgactttggcagttc

SEQ ID NO: 2227 - RNA, 20 nt, synthetic construct
  source 1..20: mol_type = other RNA
agttgactttggcagttctt

SEQ ID NO: 2228 - RNA, 20 nt, synthetic construct
  source 1..20: mol_type = other RNA
gttgactttggcagttcttg

SEQ ID NO: 2229 - RNA, 20 nt, synthetic construct
  source 1..20: mol_type = other RNA
ttgactttggcagttcttgt

SEQ ID NO: 2230 - RNA, 20 nt, synthetic construct
  source 1..20: mol_type = other RNA
cactgtgatctaaaacctga

SEQ ID NO: 2231 - RNA, 20 nt, synthetic construct
  source 1..20: mol_type = other RNA
actgtgatctaaaacctgaa

SEQ ID NO: 2232 - RNA, 20 nt, synthetic construct
  source 1..20: mol_type = other RNA
ctgtgatctaaaacctgaaa

SEQ ID NO: 2233 - RNA, 20 nt, synthetic construct
  source 1..20: mol_type = other RNA
tgtgatctaaaacctgaaaa

SEQ ID NO: 2234 - RNA, 20 nt, synthetic construct
  source 1..20: mol_type = other RNA
gtgatctaaaacctgaaaat

SEQ ID NO: 2235 - RNA, 20 nt, synthetic construct
  source 1..20: mol_type = other RNA
acctgaaaatatccttcttt

SEQ ID NO: 2236 - RNA, 20 nt, synthetic construct
  source 1..20: mol_type = other RNA
cctgaaaatatccttctttg

SEQ ID NO: 2237 - RNA, 20 nt, synthetic construct
  source 1..20: mol_type = other RNA
ctgaaaatatccttctttgt

SEQ ID NO: 2238 - RNA, 20 nt, synthetic construct
  source 1..20: mol_type = other RNA
tgaaaatatccttctttgta

SEQ ID NO: 2239 - RNA, 20 nt, synthetic construct
  source 1..20: mol_type = other RNA
gaaaatatccttctttgtaa

SEQ ID NO: 2240 - RNA, 20 nt, synthetic construct
  source 1..20: mol_type = other RNA
aaaatatccttctttgtaac

SEQ ID NO: 2241 - RNA, 20 nt, synthetic construct
  source 1..20: mol_type = other RNA
cattaaaataataaagaaca

SEQ ID NO: 2242 - RNA, 20 nt, synthetic construct
  source 1..20: mol_type = other RNA
taaaataataaagaacaaga

SEQ ID NO: 2243 - RNA, 20 nt, synthetic construct
  source 1..20: mol_type = other RNA
tgccattaaaataataaaga

SEQ ID NO: 2244 - RNA, 20 nt, synthetic construct
  source 1..20: mol_type = other RNA
gccattaaaataataaagaa

SEQ ID NO: 2245 - RNA, 20 nt, synthetic construct
  source 1..20: mol_type = other RNA
ccattaaaataataaagaac

SEQ ID NO: 2246 - RNA, 20 nt, synthetic construct
  source 1..20: mol_type = other RNA
attaaaataataaagaacaa

SEQ ID NO: 2247 - RNA, 20 nt, synthetic construct
  source 1..20: mol_type = other RNA
ttaaaataataaagaacaag

SEQ ID NO: 2248 - RNA, 20 nt, synthetic construct
  source 1..20: mol_type = other RNA
ttgtggacttcggcagctcc

SEQ ID NO: 2249 - RNA, 20 nt, synthetic construct
  source 1..20: mol_type = other RNA
tggacttcggcagctcctgc

SEQ ID NO: 2250 - RNA, 20 nt, synthetic construct
  source 1..20: mol_type = other RNA
gtggacttcggcagctcctg

SEQ ID NO: 2251 - RNA, 20 nt, synthetic construct
  source 1..20: mol_type = other RNA
tgtggacttcggcagctcct

SEQ ID NO: 2252 - RNA, 20 nt, synthetic construct
  source 1..20: mol_type = other RNA
attgtggacttcggcagctc

SEQ ID NO: 2253 - RNA, 20 nt, synthetic construct
  source 1..20: mol_type = other RNA
gcgacctcaagcccgaaaac

SEQ ID NO: 2254 - RNA, 20 nt, synthetic construct
  source 1..20: mol_type = other RNA
tgcgacctcaagcccgaaaa

SEQ ID NO: 2255 - RNA, 20 nt, synthetic construct
  source 1..20: mol_type = other RNA
ctgcgacctcaagcccgaaa

SEQ ID NO: 2256 - RNA, 20 nt, synthetic construct
  source 1..20: mol_type = other RNA
actgcgacctcaagcccgaa

SEQ ID NO: 2257 - RNA, 20 nt, synthetic construct
  source 1..20: mol_type = other RNA
cactgcgacctcaagcccga

SEQ ID NO: 2258 - RNA, 20 nt, synthetic construct
  source 1..20: mol_type = other RNA
aaaacatcttgctgtgcaac

SEQ ID NO: 2259 - RNA, 20 nt, synthetic construct
  source 1..20: mol_type = other RNA
gaaaacatcttgctgtgcaa

SEQ ID NO: 2260 - RNA, 20 nt, synthetic construct
  source 1..20: mol_type = other RNA
cgaaaacatcttgctgtgca

SEQ ID NO: 2261 - RNA, 20 nt, synthetic construct
  source 1..20: mol_type = other RNA
ccgaaaacatcttgctgtgc

SEQ ID NO: 2262 - RNA, 20 nt, synthetic construct
  source 1..20: mol_type = other RNA
cccgaaaacatcttgctgtg

SEQ ID NO: 2263 - RNA, 20 nt, synthetic construct
  source 1..20: mol_type = other RNA
gcccgaaaacatcttgctgt

SEQ ID NO: 2264 - RNA, 20 nt, synthetic construct
  source 1..20: mol_type = other RNA
tcaagatcatcaagaacaaa

SEQ ID NO: 2265 - RNA, 20 nt, synthetic construct
  source 1..20: mol_type = other RNA
atcaagatcatcaagaacaa

SEQ ID NO: 2266 - RNA, 20 nt, synthetic construct
  source 1..20: mol_type = other RNA
catcaagatcatcaagaaca

SEQ ID NO: 2267 - RNA, 20 nt, synthetic construct
  source 1..20: mol_type = other RNA
ccatcaagatcatcaagaac

SEQ ID NO: 2268 - RNA, 20 nt, synthetic construct
  source 1..20: mol_type = other RNA
gccatcaagatcatcaagaa

SEQ ID NO: 2269 - RNA, 20 nt, synthetic construct
  source 1..20: mol_type = other RNA
ggccatcaagatcatcaaga

SEQ ID NO: 2270 - RNA, 20 nt, synthetic construct
  source 1..20: mol_type = other RNA
cactgtgaccttaagcccga

SEQ ID NO: 2271 - RNA, 20 nt, synthetic construct
  source 1..20: mol_type = other RNA
actgtgaccttaagcccgag

SEQ ID NO: 2272 - RNA, 20 nt, synthetic construct
  source 1..20: mol_type = other RNA
ctgtgaccttaagcccgaga

SEQ ID NO: 2273 - RNA, 20 nt, synthetic construct
  source 1..20: mol_type = other RNA
tgtgaccttaagcccgagaa

SEQ ID NO: 2274 - RNA, 20 nt, synthetic construct
  source 1..20: mol_type = other RNA
gtgaccttaagcccgagaac

SEQ ID NO: 2275 - RNA, 20 nt, synthetic construct
  source 1..20: mol_type = other RNA
gccctaaagatggtgcggaa

SEQ ID NO: 2276 - RNA, 20 nt, synthetic construct
  source 1..20: mol_type = other RNA
cctaaagatggtgcggaatg

SEQ ID NO: 2277 - RNA, 20 nt, synthetic construct
  source 1..20: mol_type = other RNA
ggccctaaagatggtgcgga

SEQ ID NO: 2278 - RNA, 20 nt, synthetic construct
  source 1..20: mol_type = other RNA
ccctaaagatggtgcggaat

SEQ ID NO: 2279 - RNA, 20 nt, synthetic construct
  source 1..20: mol_type = other RNA
ctaaagatggtgcggaatga

SEQ ID NO: 2280 - RNA, 20 nt, synthetic construct
  source 1..20: mol_type = other RNA
taaagatggtgcggaatgag

SEQ ID NO: 2281 - RNA, 20 nt, synthetic construct
  source 1..20: mol_type = other RNA
tcattgactttgggtccagc

SEQ ID NO: 2282 - RNA, 20 nt, synthetic construct
  source 1..20: mol_type = other RNA
gtcattgactttgggtccag

SEQ ID NO: 2283 - RNA, 20 nt, synthetic construct
  source 1..20: mol_type = other RNA
cattgactttgggtccagct

SEQ ID NO: 2284 - RNA, 20 nt, synthetic construct
  source 1..20: mol_type = other RNA
attgactttgggtccagctg

SEQ ID NO: 2285 - RNA, 20 nt, synthetic construct
  source 1..20: mol_type = other RNA
ttgactttgggtccagctgt

SEQ ID NO: 2286 - RNA, 20 nt, synthetic construct
  source 1..20: mol_type = other RNA
cactgcgatctgaagccaga

SEQ ID NO: 2287 - RNA, 20 nt, synthetic construct
  source 1..20: mol_type = other RNA
actgcgatctgaagccagaa

SEQ ID NO: 2288 - RNA, 20 nt, synthetic construct
  source 1..20: mol_type = other RNA
ctgcgatctgaagccagaaa

SEQ ID NO: 2289 - RNA, 20 nt, synthetic construct
  source 1..20: mol_type = other RNA
tgcgatctgaagccagaaaa

SEQ ID NO: 2290 - RNA, 20 nt, synthetic construct
  source 1..20: mol_type = other RNA
gcgatctgaagccagaaaac

SEQ ID NO: 2291 - RNA, 20 nt, synthetic construct
  source 1..20: mol_type = other RNA
gccagaaaacattctcctga

SEQ ID NO: 2292 - RNA, 20 nt, synthetic construct
  source 1..20: mol_type = other RNA
ccagaaaacattctcctgaa

SEQ ID NO: 2293 - RNA, 20 nt, synthetic construct
  source 1..20: mol_type = other RNA
cagaaaacattctcctgaaa

SEQ ID NO: 2294 - RNA, 20 nt, synthetic construct
  source 1..20: mol_type = other RNA
agaaaacattctcctgaaac

SEQ ID NO: 2295 - RNA, 20 nt, synthetic construct
  source 1..20: mol_type = other RNA
gaaaacattctcctgaaaca

SEQ ID NO: 2296 - RNA, 20 nt, synthetic construct
  source 1..20: mol_type = other RNA
aaaacattctcctgaaacac

SEQ ID NO: 2297 - RNA, 20 nt, synthetic construct
  source 1..20: mol_type = other RNA
tcattgactttggatcaagc

SEQ ID NO: 2298 - RNA, 20 nt, synthetic construct
  source 1..20: mol_type = other RNA
gtcattgactttggatcaag

SEQ ID NO: 2299 - RNA, 20 nt, synthetic construct
  source 1..20: mol_type = other RNA
cattgactttggatcaagct

SEQ ID NO: 2300 - RNA, 20 nt, synthetic construct
  source 1..20: mol_type = other RNA
attgactttggatcaagctg

SEQ ID NO: 2301 - RNA, 20 nt, synthetic construct
  source 1..20: mol_type = other RNA
ttgactttggatcaagctgt

SEQ ID NO: 2302 - RNA, 20 nt, synthetic construct
  source 1..20: mol_type = other RNA
actgtgatctcaagcccgtg

SEQ ID NO: 2303 - RNA, 20 nt, synthetic construct
  source 1..20: mol_type = other RNA
cactgtgatctcaagcccgt

SEQ ID NO: 2304 - RNA, 20 nt, synthetic construct
  source 1..20: mol_type = other RNA
ctgtgatctcaagcccgtga

SEQ ID NO: 2305 - RNA, 20 nt, synthetic construct
  source 1..20: mol_type = other RNA
tgtgatctcaagcccgtgag

SEQ ID NO: 2306 - RNA, 20 nt, synthetic construct
  source 1..20: mol_type = other RNA
gtgatctcaagcccgtgagt

SEQ ID NO: 2307 - RNA, 20 nt, synthetic construct
  source 1..20: mol_type = other RNA
ctaggaaaatatagtgctat

SEQ ID NO: 2308 - RNA, 20 nt, synthetic construct
  source 1..20: mol_type = other RNA
taggaaaatatagtgctata

SEQ ID NO: 2309 - RNA, 20 nt, synthetic construct
  source 1..20: mol_type = other RNA
aggaaaatatagtgctatac

SEQ ID NO: 2310 - RNA, 20 nt, synthetic construct
  source 1..20: mol_type = other RNA
ggaaaatatagtgctatacc

SEQ ID NO: 2311 - RNA, 20 nt, synthetic construct
  source 1..20: mol_type = other RNA
gaaaatatagtgctatacca

SEQ ID NO: 2312 - RNA, 20 nt, synthetic construct
  source 1..20: mol_type = other RNA
aaaatatagtgctataccaa

SEQ ID NO: 2313 - RNA, 20 nt, synthetic construct
  source 1..20: mol_type = other RNA
cctgaaaatcatcaggaaca

SEQ ID NO: 2314 - RNA, 20 nt, synthetic construct
  source 1..20: mol_type = other RNA
gaaaatcatcaggaacaaga

SEQ ID NO: 2315 - RNA, 20 nt, synthetic construct
  source 1..20: mol_type = other RNA
ggccctgaaaatcatcagga

SEQ ID NO: 2316 - RNA, 20 nt, synthetic construct
  source 1..20: mol_type = other RNA
gccctgaaaatcatcaggaa

SEQ ID NO: 2317 - RNA, 20 nt, synthetic construct
  source 1..20: mol_type = other RNA
ccctgaaaatcatcaggaac

SEQ ID NO: 2318 - RNA, 20 nt, synthetic construct
  source 1..20: mol_type = other RNA
ctgaaaatcatcaggaacaa

SEQ ID NO: 2319 - RNA, 20 nt, synthetic construct
  source 1..20: mol_type = other RNA
tgaaaatcatcaggaacaag

SEQ ID NO: 2320 - RNA, 20 nt, synthetic construct
  source 1..20: mol_type = other RNA
cactgacccacagatccaca

SEQ ID NO: 2321 - RNA, 20 nt, synthetic construct
  source 1..20: mol_type = other RNA
actgacccacagatccacac

SEQ ID NO: 2322 - RNA, 20 nt, synthetic construct
  source 1..20: mol_type = other RNA
tacactgacccacagatcca

SEQ ID NO: 2323 - RNA, 20 nt, synthetic construct
  source 1..20: mol_type = other RNA
acactgacccacagatccac

SEQ ID NO: 2324 - RNA, 20 nt, synthetic construct
  source 1..20: mol_type = other RNA
ctgacccacagatccacacg

SEQ ID NO: 2325 - RNA, 20 nt, synthetic construct
  source 1..20: mol_type = other RNA
gtggtggacatccagggagt

SEQ ID NO: 2326 - RNA, 20 nt, synthetic construct
  source 1..20: mol_type = other RNA
tggtggacatccagggagtt

SEQ ID NO: 2327 - RNA, 20 nt, synthetic construct
  source 1..20: mol_type = other RNA
ggtggacatccagggagttg

SEQ ID NO: 2328 - RNA, 20 nt, synthetic construct
  source 1..20: mol_type = other RNA
gtggacatccagggagttgg

SEQ ID NO: 2329 - RNA, 20 nt, synthetic construct
  source 1..20: mol_type = other RNA
tggacatccagggagttggg

SEQ ID NO: 2330 - RNA, 20 nt, synthetic construct
  source 1..20: mol_type = other RNA
gacatccagggagttgggga

SEQ ID NO: 2331 - RNA, 20 nt, synthetic construct
  source 1..20: mol_type = other RNA
acatccagggagttggggat

SEQ ID NO: 2332 - RNA, 20 nt, synthetic construct
  source 1..20: mol_type = other RNA
catccagggagttggggatc

SEQ ID NO: 2333 - RNA, 20 nt, synthetic construct
  source 1..20: mol_type = other RNA
atccagggagttggggatct

SEQ ID NO: 2334 - RNA, 20 nt, synthetic construct
  source 1..20: mol_type = other RNA
tccagggagttggggatctc

SEQ ID NO: 2335 - RNA, 20 nt, synthetic construct
  source 1..20: mol_type = other RNA
cgtggcgaagcgctacatcg

SEQ ID NO: 2336 - RNA, 20 nt, synthetic construct
  source 1..20: mol_type = other RNA
gcgaagcgctacatcgagcc

SEQ ID NO: 2337 - RNA, 20 nt, synthetic construct
  source 1..20: mol_type = other RNA
gtggcgaagcgctacatcga

SEQ ID NO: 2338 - RNA, 20 nt, synthetic construct
  source 1..20: mol_type = other RNA
tggcgaagcgctacatcgag

SEQ ID NO: 2339 - RNA, 20 nt, synthetic construct
  source 1..20: mol_type = other RNA
ggcgaagcgctacatcgagc

SEQ ID NO: 2340 - RNA, 20 nt, synthetic construct
  source 1..20: mol_type = other RNA
cgaagcgctacatcgagccc

SEQ ID NO: 2341 - RNA, 20 nt, synthetic construct
  source 1..20: mol_type = other RNA
cgcgacctggcagccaggaa

SEQ ID NO: 2342 - RNA, 20 nt, synthetic construct
  source 1..20: mol_type = other RNA
caccgcgacctggcagccag

SEQ ID NO: 2343 - RNA, 20 nt, synthetic construct
  source 1..20: mol_type = other RNA
accgcgacctggcagccagg

SEQ ID NO: 2344 - RNA, 20 nt, synthetic construct
  source 1..20: mol_type = other RNA
ccgcgacctggcagccagga

SEQ ID NO: 2345 - RNA, 20 nt, synthetic construct
  source 1..20: mol_type = other RNA
gcgacctggcagccaggaac

SEQ ID NO: 2346 - RNA, 20 nt, synthetic construct
  source 1..20: mol_type = other RNA
agccaggaacgtactggtga

SEQ ID NO: 2347 - RNA, 20 nt, synthetic construct
  source 1..20: mol_type = other RNA
gccaggaacgtactggtgaa

SEQ ID NO: 2348 - RNA, 20 nt, synthetic construct
  source 1..20: mol_type = other RNA
ccaggaacgtactggtgaaa

SEQ ID NO: 2349 - RNA, 20 nt, synthetic construct
  source 1..20: mol_type = other RNA
caggaacgtactggtgaaaa

SEQ ID NO: 2350 - RNA, 20 nt, synthetic construct
  source 1..20: mol_type = other RNA
aggaacgtactggtgaaaac

SEQ ID NO: 2351 - RNA, 20 nt, synthetic construct
  source 1..20: mol_type = other RNA
ggaacgtactggtgaaaaca

SEQ ID NO: 2352 - RNA, 20 nt, synthetic construct
  source 1..20: mol_type = other RNA
gctatcaaggaattaagaga

SEQ ID NO: 2353 - RNA, 20 nt, synthetic construct
  source 1..20: mol_type = other RNA
cgctatcaaggaattaagag

SEQ ID NO: 2354 - RNA, 20 nt, synthetic construct
  source 1..20: mol_type = other RNA
ctatcaaggaattaagagaa

SEQ ID NO: 2355 - RNA, 20 nt, synthetic construct
  source 1..20: mol_type = other RNA
tatcaaggaattaagagaag

SEQ ID NO: 2356 - RNA, 20 nt, synthetic construct
  source 1..20: mol_type = other RNA
atcaaggaattaagagaagc

SEQ ID NO: 2357 - RNA, 20 nt, synthetic construct
  source 1..20: mol_type = other RNA
tcaaggaattaagagaagca

SEQ ID NO: 2358 - RNA, 20 nt, synthetic construct
  source 1..20: mol_type = other RNA
taggagactttggtctggcc

SEQ ID NO: 2359 - RNA, 20 nt, synthetic construct
  source 1..20: mol_type = other RNA
gagactttggtctggcctgc

SEQ ID NO: 2360 - RNA, 20 nt, synthetic construct
  source 1..20: mol_type = other RNA
ggagactttggtctggcctg

SEQ ID NO: 2361 - RNA, 20 nt, synthetic construct
  source 1..20: mol_type = other RNA
aggagactttggtctggcct

SEQ ID NO: 2362 - RNA, 20 nt, synthetic construct
  source 1..20: mol_type = other RNA
ataggagactttggtctggc

SEQ ID NO: 2363 - RNA, 20 nt, synthetic construct
  source 1..20: mol_type = other RNA
gagatctgaaggtaagtggg

SEQ ID NO: 2364 - RNA, 20 nt, synthetic construct
  source 1..20: mol_type = other RNA
cgagatctgaaggtaagtgg

SEQ ID NO: 2365 - RNA, 20 nt, synthetic construct
  source 1..20: mol_type = other RNA
ccgagatctgaaggtaagtg

SEQ ID NO: 2366 - RNA, 20 nt, synthetic construct
  source 1..20: mol_type = other RNA
accgagatctgaaggtaagt

SEQ ID NO: 2367 - RNA, 20 nt, synthetic construct
  source 1..20: mol_type = other RNA
caccgagatctgaaggtaag

SEQ ID NO: 2368 - RNA, 20 nt, synthetic construct
  source 1..20: mol_type = other RNA
gagactttggacttgtaaca

SEQ ID NO: 2369 - RNA, 20 nt, synthetic construct
  source 1..20: mol_type = other RNA
ggagactttggacttgtaac

SEQ ID NO: 2370 - RNA, 20 nt, synthetic construct
  source 1..20: mol_type = other RNA
tggagactttggacttgtaa

SEQ ID NO: 2371 - RNA, 20 nt, synthetic construct
  source 1..20: mol_type = other RNA
ttggagactttggacttgta

SEQ ID NO: 2372 - RNA, 20 nt, synthetic construct
  source 1..20: mol_type = other RNA
attggagactttggacttgt

SEQ ID NO: 2373 - RNA, 20 nt, synthetic construct
  source 1..20: mol_type = other RNA
atagagatcttaaggtaagt

SEQ ID NO: 2374 - RNA, 20 nt, synthetic construct
  source 1..20: mol_type = other RNA
catagagatcttaaggtaag

SEQ ID NO: 2375 - RNA, 20 nt, synthetic construct
  source 1..20: mol_type = other RNA
gagatcttaaggtaagtgga

SEQ ID NO: 2376 - RNA, 20 nt, synthetic construct
  source 1..20: mol_type = other RNA
agagatcttaaggtaagtgg

SEQ ID NO: 2377 - RNA, 20 nt, synthetic construct
  source 1..20: mol_type = other RNA
tagagatcttaaggtaagtg

SEQ ID NO: 2378 - RNA, 20 nt, synthetic construct
  source 1..20: mol_type = other RNA
ccaagtaatatattcttagt

SEQ ID NO: 2379 - RNA, 20 nt, synthetic construct
  source 1..20: mol_type = other RNA
gtaatatattcttagtagat

SEQ ID NO: 2380 - RNA, 20 nt, synthetic construct
  source 1..20: mol_type = other RNA
agtaatatattcttagtaga

SEQ ID NO: 2381 - RNA, 20 nt, synthetic construct
  source 1..20: mol_type = other RNA
aagtaatatattcttagtag

SEQ ID NO: 2382 - RNA, 20 nt, synthetic construct
  source 1..20: mol_type = other RNA
caagtaatatattcttagta

SEQ ID NO: 2383 - RNA, 20 nt, synthetic construct
  source 1..20: mol_type = other RNA
gccaagtaatatattcttag

SEQ ID NO: 2384 - RNA, 20 nt, synthetic construct
  source 1..20: mol_type = other RNA
taaacgtgttaaatataata

SEQ ID NO: 2385 - RNA, 20 nt, synthetic construct
  source 1..20: mol_type = other RNA
ttaaacgtgttaaatataat

SEQ ID NO: 2386 - RNA, 20 nt, synthetic construct
  source 1..20: mol_type = other RNA
attaaacgtgttaaatataa

SEQ ID NO: 2387 - RNA, 20 nt, synthetic construct
  source 1..20: mol_type = other RNA
tattaaacgtgttaaatata

SEQ ID NO: 2388 - RNA, 20 nt, synthetic construct
  source 1..20: mol_type = other RNA
ttattaaacgtgttaaatat

SEQ ID NO: 2389 - RNA, 20 nt, synthetic construct
  source 1..20: mol_type = other RNA
gttattaaacgtgttaaata

SEQ ID NO: 2390 - RNA, 20 nt, synthetic construct
  source 1..20: mol_type = other RNA
cgttattaaacgtgttaaat

SEQ ID NO: 2391 - RNA, 20 nt, synthetic construct
  source 1..20: mol_type = other RNA
ggagactttgggttagtgac

SEQ ID NO: 2392 - RNA, 20 nt, synthetic construct
  source 1..20: mol_type = other RNA
gagactttgggttagtgact

SEQ ID NO: 2393 - RNA, 20 nt, synthetic construct
  source 1..20: mol_type = other RNA
tggagactttgggttagtga

SEQ ID NO: 2394 - RNA, 20 nt, synthetic construct
  source 1..20: mol_type = other RNA
ttggagactttgggttagtg

SEQ ID NO: 2395 - RNA, 20 nt, synthetic construct
  source 1..20: mol_type = other RNA
gttggagactttgggttagt

SEQ ID NO: 2396 - RNA, 20 nt, synthetic construct
  source 1..20: mol_type = other RNA
gggacctcaaggtctgtatt

SEQ ID NO: 2397 - RNA, 20 nt, synthetic construct
  source 1..20: mol_type = other RNA
agggacctcaaggtctgtat

SEQ ID NO: 2398 - RNA, 20 nt, synthetic construct
  source 1..20: mol_type = other RNA
cagggacctcaaggtctgta

SEQ ID NO: 2399 - RNA, 20 nt, synthetic construct
  source 1..20: mol_type = other RNA
acagggacctcaaggtctgt

SEQ ID NO: 2400 - RNA, 20 nt, synthetic construct
  source 1..20: mol_type = other RNA
cacagggacctcaaggtctg

SEQ ID NO: 2401 - RNA, 20 nt, synthetic construct
  source 1..20: mol_type = other RNA
tccaacatattctttacaat

SEQ ID NO: 2402 - RNA, 20 nt, synthetic construct
  source 1..20: mol_type = other RNA
atccaacatattctttacaa

SEQ ID NO: 2403 - RNA, 20 nt, synthetic construct
  source 1..20: mol_type = other RNA
ccaacatattctttacaatg

SEQ ID NO: 2404 - RNA, 20 nt, synthetic construct
  source 1..20: mol_type = other RNA
catccaacatattctttaca

SEQ ID NO: 2405 - RNA, 20 nt, synthetic construct
  source 1..20: mol_type = other RNA
ccatccaacatattctttac

SEQ ID NO: 2406 - RNA, 20 nt, synthetic construct
  source 1..20: mol_type = other RNA
gccatccaacatattcttta

SEQ ID NO: 2407 - RNA, 20 nt, synthetic construct
  source 1..20: mol_type = other RNA
tcaagaggatccgtctcccc

SEQ ID NO: 2408 - RNA, 20 nt, synthetic construct
  source 1..20: mol_type = other RNA
atcaagaggatccgtctccc

SEQ ID NO: 2409 - RNA, 20 nt, synthetic construct
  source 1..20: mol_type = other RNA
tatcaagaggatccgtctcc

SEQ ID NO: 2410 - RNA, 20 nt, synthetic construct
  source 1..20: mol_type = other RNA
ctatcaagaggatccgtctc

SEQ ID NO: 2411 - RNA, 20 nt, synthetic construct
  source 1..20: mol_type = other RNA
gctatcaagaggatccgtct

SEQ ID NO: 2412 - RNA, 20 nt, synthetic construct
  source 1..20: mol_type = other RNA
tgctatcaagaggatccgtc

SEQ ID NO: 2413 - RNA, 20 nt, synthetic construct
  source 1..20: mol_type = other RNA
tacggactatagcatttcta

SEQ ID NO: 2414 - RNA, 20 nt, synthetic construct
  source 1..20: mol_type = other RNA
cggactatagcatttctaag

SEQ ID NO: 2415 - RNA, 20 nt, synthetic construct
  source 1..20: mol_type = other RNA
attacggactatagcatttc

SEQ ID NO: 2416 - RNA, 20 nt, synthetic construct
  source 1..20: mol_type = other RNA
ttacggactatagcatttct

SEQ ID NO: 2417 - RNA, 20 nt, synthetic construct
  source 1..20: mol_type = other RNA
acggactatagcatttctaa

SEQ ID NO: 2418 - RNA, 20 nt, synthetic construct
  source 1..20: mol_type = other RNA
caccgggatttgaagcctgt

SEQ ID NO: 2419 - RNA, 20 nt, synthetic construct
  source 1..20: mol_type = other RNA
accgggatttgaagcctgtc

SEQ ID NO: 2420 - RNA, 20 nt, synthetic construct
  source 1..20: mol_type = other RNA
ccgggatttgaagcctgtca

SEQ ID NO: 2421 - RNA, 20 nt, synthetic construct
  source 1..20: mol_type = other RNA
cgggatttgaagcctgtcaa

SEQ ID NO: 2422 - RNA, 20 nt, synthetic construct
  source 1..20: mol_type = other RNA
gggatttgaagcctgtcaac

SEQ ID NO: 2423 - RNA, 20 nt, synthetic construct
  source 1..20: mol_type = other RNA
gcatctaatgtcttggtgga

SEQ ID NO: 2424 - RNA, 20 nt, synthetic construct
  source 1..20: mol_type = other RNA
tctaatgtcttggtggatgc

SEQ ID NO: 2425 - RNA, 20 nt, synthetic construct
  source 1..20: mol_type = other RNA
tgcatctaatgtcttggtgg

SEQ ID NO: 2426 - RNA, 20 nt, synthetic construct
  source 1..20: mol_type = other RNA
catctaatgtcttggtggat

SEQ ID NO: 2427 - RNA, 20 nt, synthetic construct
  source 1..20: mol_type = other RNA
atctaatgtcttggtggatg

SEQ ID NO: 2428 - RNA, 20 nt, synthetic construct
  source 1..20: mol_type = other RNA
ctaatgtcttggtggatgca

SEQ ID NO: 2429 - RNA, 20 nt, synthetic construct
  source 1..20: mol_type = other RNA
cgcagtgaagcgcatcccca

SEQ ID NO: 2430 - RNA, 20 nt, synthetic construct
  source 1..20: mol_type = other RNA
gcagtgaagcgcatccccat

SEQ ID NO: 2431 - RNA, 20 nt, synthetic construct
  source 1..20: mol_type = other RNA
cagtgaagcgcatccccatc

SEQ ID NO: 2432 - RNA, 20 nt, synthetic construct
  source 1..20: mol_type = other RNA
agtgaagcgcatccccatca

SEQ ID NO: 2433 - RNA, 20 nt, synthetic construct
  source 1..20: mol_type = other RNA
gtgaagcgcatccccatcaa

SEQ ID NO: 2434 - RNA, 20 nt, synthetic construct
  source 1..20: mol_type = other RNA
tgaagcgcatccccatcaac

SEQ ID NO: 2435 - RNA, 20 nt, synthetic construct
  source 1..20: mol_type = other RNA
tgtctgactttggcctgact

SEQ ID NO: 2436 - RNA, 20 nt, synthetic construct
  source 1..20: mol_type = other RNA
ctgactttggcctgactcgc

SEQ ID NO: 2437 - RNA, 20 nt, synthetic construct
  source 1..20: mol_type = other RNA
tctgactttggcctgactcg

SEQ ID NO: 2438 - RNA, 20 nt, synthetic construct
  source 1..20: mol_type = other RNA
gtctgactttggcctgactc

SEQ ID NO: 2439 - RNA, 20 nt, synthetic construct
  source 1..20: mol_type = other RNA
gtgtctgactttggcctgac

SEQ ID NO: 2440 - RNA, 20 nt, synthetic construct
  source 1..20: mol_type = other RNA
gggacctggctgccagaaac

SEQ ID NO: 2441 - RNA, 20 nt, synthetic construct
  source 1..20: mol_type = other RNA
cgggacctggctgccagaaa

SEQ ID NO: 2442 - RNA, 20 nt, synthetic construct
  source 1..20: mol_type = other RNA
ccgggacctggctgccagaa

SEQ ID NO: 2443 - RNA, 20 nt, synthetic construct
  source 1..20: mol_type = other RNA
accgggacctggctgccaga

SEQ ID NO: 2444 - RNA, 20 nt, synthetic construct
  source 1..20: mol_type = other RNA
caccgggacctggctgccag

SEQ ID NO: 2445 - RNA, 20 nt, synthetic construct
  source 1..20: mol_type = other RNA
gaaacatcttggtgaatcaa

SEQ ID NO: 2446 - RNA, 20 nt, synthetic construct
  source 1..20: mol_type = other RNA
agaaacatcttggtgaatca

SEQ ID NO: 2447 - RNA, 20 nt, synthetic construct
  source 1..20: mol_type = other RNA
cagaaacatcttggtgaatc

SEQ ID NO: 2448 - RNA, 20 nt, synthetic construct
  source 1..20: mol_type = other RNA
ccagaaacatcttggtgaat

SEQ ID NO: 2449 - RNA, 20 nt, synthetic construct
  source 1..20: mol_type = other RNA
gccagaaacatcttggtgaa

SEQ ID NO: 2450 - RNA, 20 nt, synthetic construct
  source 1..20: mol_type = other RNA
tgccagaaacatcttggtga

SEQ ID NO: 2451 - RNA, 20 nt, synthetic construct
  source 1..20: mol_type = other RNA
ttaagaccttaaaagacaca

SEQ ID NO: 2452 - RNA, 20 nt, synthetic construct
  source 1..20: mol_type = other RNA
attaagaccttaaaagacac

SEQ ID NO: 2453 - RNA, 20 nt, synthetic construct
  source 1..20: mol_type = other RNA
cattaagaccttaaaagaca

SEQ ID NO: 2454 - RNA, 20 nt, synthetic construct
  source 1..20: mol_type = other RNA
ccattaagaccttaaaagac

SEQ ID NO: 2455 - RNA, 20 nt, synthetic construct
  source 1..20: mol_type = other RNA
gccattaagaccttaaaaga

SEQ ID NO: 2456 - RNA, 20 nt, synthetic construct
  source 1..20: mol_type = other RNA
ggccattaagaccttaaaag

SEQ ID NO: 2457 - RNA, 20 nt, synthetic construct
  source 1..20: mol_type = other RNA
tctgactttggcctgtcccg

SEQ ID NO: 2458 - RNA, 20 nt, synthetic construct
  source 1..20: mol_type = other RNA
tgtctgactttggcctgtcc

SEQ ID NO: 2459 - RNA, 20 nt, synthetic construct
  source 1..20: mol_type = other RNA
ctgactttggcctgtcccgc

SEQ ID NO: 2460 - RNA, 20 nt, synthetic construct
  source 1..20: mol_type = other RNA
gtctgactttggcctgtccc

SEQ ID NO: 2461 - RNA, 20 nt, synthetic construct
  source 1..20: mol_type = other RNA
gtgtctgactttggcctgtc

SEQ ID NO: 2462 - RNA, 20 nt, synthetic construct
  source 1..20: mol_type = other RNA
gtgacctggctgcccgcaac

SEQ ID NO: 2463 - RNA, 20 nt, synthetic construct
  source 1..20: mol_type = other RNA
cgtgacctggctgcccgcaa

SEQ ID NO: 2464 - RNA, 20 nt, synthetic construct
  source 1..20: mol_type = other RNA
ccgtgacctggctgcccgca

SEQ ID NO: 2465 - RNA, 20 nt, synthetic construct
  source 1..20: mol_type = other RNA
accgtgacctggctgcccgc

SEQ ID NO: 2466 - RNA, 20 nt, synthetic construct
  source 1..20: mol_type = other RNA
caccgtgacctggctgcccg

SEQ ID NO: 2467 - RNA, 20 nt, synthetic construct
  source 1..20: mol_type = other RNA
cccgcaacatcctcgtcaac

SEQ ID NO: 2468 - RNA, 20 nt, synthetic construct
  source 1..20: mol_type = other RNA
gcaacatcctcgtcaacagc

SEQ ID NO: 2469 - RNA, 20 nt, synthetic construct
  source 1..20: mol_type = other RNA
cgcaacatcctcgtcaacag

SEQ ID NO: 2470 - RNA, 20 nt, synthetic construct
  source 1..20: mol_type = other RNA
ccgcaacatcctcgtcaaca

SEQ ID NO: 2471 - RNA, 20 nt, synthetic construct
  source 1..20: mol_type = other RNA
gcccgcaacatcctcgtcaa

SEQ ID NO: 2472 - RNA, 20 nt, synthetic construct
  source 1..20: mol_type = other RNA
tgcccgcaacatcctcgtca

SEQ ID NO: 2473 - RNA, 20 nt, synthetic construct
  source 1..20: mol_type = other RNA
ccatcaagacgctgaaagcc

SEQ ID NO: 2474 - RNA, 20 nt, synthetic construct
  source 1..20: mol_type = other RNA
gccatcaagacgctgaaagc

SEQ ID NO: 2475 - RNA, 20 nt, synthetic construct
  source 1..20: mol_type = other RNA
tcaagacgctgaaagccggc

SEQ ID NO: 2476 - RNA, 20 nt, synthetic construct
  source 1..20: mol_type = other RNA
atcaagacgctgaaagccgg

SEQ ID NO: 2477 - RNA, 20 nt, synthetic construct
  source 1..20: mol_type = other RNA
catcaagacgctgaaagccg

SEQ ID NO: 2478 - RNA, 20 nt, synthetic construct
  source 1..20: mol_type = other RNA
ggccatcaagacgctgaaag

SEQ ID NO: 2479 - RNA, 20 nt, synthetic construct
  source 1..20: mol_type = other RNA
tttctgatttcggactttcg

SEQ ID NO: 2480 - RNA, 20 nt, synthetic construct
  source 1..20: mol_type = other RNA
tctgatttcggactttcgcg

SEQ ID NO: 2481 - RNA, 20 nt, synthetic construct
  source 1..20: mol_type = other RNA
gtttctgatttcggactttc

SEQ ID NO: 2482 - RNA, 20 nt, synthetic construct
  source 1..20: mol_type = other RNA
ttctgatttcggactttcgc

SEQ ID NO: 2483 - RNA, 20 nt, synthetic construct
  source 1..20: mol_type = other RNA
ctgatttcggactttcgcgt

SEQ ID NO: 2484 - RNA, 20 nt, synthetic construct
  source 1..20: mol_type = other RNA
caccgagacctcgctgctcg

SEQ ID NO: 2485 - RNA, 20 nt, synthetic construct
  source 1..20: mol_type = other RNA
accgagacctcgctgctcgg

SEQ ID NO: 2486 - RNA, 20 nt, synthetic construct
  source 1..20: mol_type = other RNA
ccgagacctcgctgctcgga

SEQ ID NO: 2487 - RNA, 20 nt, synthetic construct
  source 1..20: mol_type = other RNA
cgagacctcgctgctcggaa

SEQ ID NO: 2488 - RNA, 20 nt, synthetic construct
  source 1..20: mol_type = other RNA
gagacctcgctgctcggaac

SEQ ID NO: 2489 - RNA, 20 nt, synthetic construct
  source 1..20: mol_type = other RNA
ctcggaacatcttgatcaac

SEQ ID NO: 2490 - RNA, 20 nt, synthetic construct
  source 1..20: mol_type = other RNA
tgctcggaacatcttgatca

SEQ ID NO: 2491 - RNA, 20 nt, synthetic construct
  source 1..20: mol_type = other RNA
gctcggaacatcttgatcaa

SEQ ID NO: 2492 - RNA, 20 nt, synthetic construct
  source 1..20: mol_type = other RNA
tcggaacatcttgatcaaca

SEQ ID NO: 2493 - RNA, 20 nt, synthetic construct
  source 1..20: mol_type = other RNA
cggaacatcttgatcaacag

SEQ ID NO: 2494 - RNA, 20 nt, synthetic construct
  source 1..20: mol_type = other RNA
ggaacatcttgatcaacagt

SEQ ID NO: 2495 - RNA, 20 nt, synthetic construct
  source 1..20: mol_type = other RNA
gccattaagaccctgaaagt

SEQ ID NO: 2496 - RNA, 20 nt, synthetic construct
  source 1..20: mol_type = other RNA
ccattaagaccctgaaagtt

SEQ ID NO: 2497 - RNA, 20 nt, synthetic construct
  source 1..20: mol_type = other RNA
ggccattaagaccctgaaag

SEQ ID NO: 2498 - RNA, 20 nt, synthetic construct
  source 1..20: mol_type = other RNA
cattaagaccctgaaagttg

SEQ ID NO: 2499 - RNA, 20 nt, synthetic construct
  source 1..20: mol_type = other RNA
attaagaccctgaaagttgg

SEQ ID NO: 2500 - RNA, 20 nt, synthetic construct
  source 1..20: mol_type = other RNA
ttaagaccctgaaagttggc

SEQ ID NO: 2501 - RNA, 20 nt, synthetic construct
  source 1..20: mol_type = other RNA
gtgatctggccgcacggaac

SEQ ID NO: 2502 - RNA, 20 nt, synthetic construct
  source 1..20: mol_type = other RNA
cgtgatctggccgcacggaa

SEQ ID NO: 2503 - RNA, 20 nt, synthetic construct
  source 1..20: mol_type = other RNA
tcgtgatctggccgcacgga

SEQ ID NO: 2504 - RNA, 20 nt, synthetic construct
  source 1..20: mol_type = other RNA
atcgtgatctggccgcacgg

SEQ ID NO: 2505 - RNA, 20 nt, synthetic construct
  source 1..20: mol_type = other RNA
catcgtgatctggccgcacg

SEQ ID NO: 2506 - RNA, 20 nt, synthetic construct
  source 1..20: mol_type = other RNA
cacggaacatcctggtgaac

SEQ ID NO: 2507 - RNA, 20 nt, synthetic construct
  source 1..20: mol_type = other RNA
ggaacatcctggtgaacagc

SEQ ID NO: 2508 - RNA, 20 nt, synthetic construct
  source 1..20: mol_type = other RNA
cggaacatcctggtgaacag

SEQ ID NO: 2509 - RNA, 20 nt, synthetic construct
  source 1..20: mol_type = other RNA
acggaacatcctggtgaaca

SEQ ID NO: 2510 - RNA, 20 nt, synthetic construct
  source 1..20: mol_type = other RNA
gcacggaacatcctggtgaa

SEQ ID NO: 2511 - RNA, 20 nt, synthetic construct
  source 1..20: mol_type = other RNA
cgcacggaacatcctggtga

SEQ ID NO: 2512 - RNA, 20 nt, synthetic construct
  source 1..20: mol_type = other RNA
ctatcaagactctgaaagct

SEQ ID NO: 2513 - RNA, 20 nt, synthetic construct
  source 1..20: mol_type = other RNA
gctatcaagactctgaaagc

SEQ ID NO: 2514 - RNA, 20 nt, synthetic construct
  source 1..20: mol_type = other RNA
tcaagactctgaaagctggt

SEQ ID NO: 2515 - RNA, 20 nt, synthetic construct
  source 1..20: mol_type = other RNA
atcaagactctgaaagctgg

SEQ ID NO: 2516 - RNA, 20 nt, synthetic construct
  source 1..20: mol_type = other RNA
tatcaagactctgaaagctg

SEQ ID NO: 2517 - RNA, 20 nt, synthetic construct
  source 1..20: mol_type = other RNA
ggctatcaagactctgaaag

SEQ ID NO: 2518 - RNA, 20 nt, synthetic construct
  source 1..20: mol_type = other RNA
tctgactttggactttcccg

SEQ ID NO: 2519 - RNA, 20 nt, synthetic construct
  source 1..20: mol_type = other RNA
gtctgactttggactttccc

SEQ ID NO: 2520 - RNA, 20 nt, synthetic construct
  source 1..20: mol_type = other RNA
tgtctgactttggactttcc

SEQ ID NO: 2521 - RNA, 20 nt, synthetic construct
  source 1..20: mol_type = other RNA
ctgactttggactttcccgg

SEQ ID NO: 2522 - RNA, 20 nt, synthetic construct
  source 1..20: mol_type = other RNA
gtgtctgactttggactttc

SEQ ID NO: 2523 - RNA, 20 nt, synthetic construct
  source 1..20: mol_type = other RNA
gagatcttgctgccagaaac

SEQ ID NO: 2524 - RNA, 20 nt, synthetic construct
  source 1..20: mol_type = other RNA
agagatcttgctgccagaaa

SEQ ID NO: 2525 - RNA, 20 nt, synthetic construct
  source 1..20: mol_type = other RNA
tagagatcttgctgccagaa

SEQ ID NO: 2526 - RNA, 20 nt, synthetic construct
  source 1..20: mol_type = other RNA
atagagatcttgctgccaga

SEQ ID NO: 2527 - RNA, 20 nt, synthetic construct
  source 1..20: mol_type = other RNA
catagagatcttgctgccag

SEQ ID NO: 2528 - RNA, 20 nt, synthetic construct
  source 1..20: mol_type = other RNA
ccagaaacatcttaatcaac

SEQ ID NO: 2529 - RNA, 20 nt, synthetic construct
  source 1..20: mol_type = other RNA
gaaacatcttaatcaacagt

SEQ ID NO: 2530 - RNA, 20 nt, synthetic construct
  source 1..20: mol_type = other RNA
agaaacatcttaatcaacag

SEQ ID NO: 2531 - RNA, 20 nt, synthetic construct
  source 1..20: mol_type = other RNA
cagaaacatcttaatcaaca

SEQ ID NO: 2532 - RNA, 20 nt, synthetic construct
  source 1..20: mol_type = other RNA
gccagaaacatcttaatcaa

SEQ ID NO: 2533 - RNA, 20 nt, synthetic construct
  source 1..20: mol_type = other RNA
tgccagaaacatcttaatca

SEQ ID NO: 2534 - RNA, 20 nt, synthetic construct
  source 1..20: mol_type = other RNA
ctatcaaaacccttaaagta

SEQ ID NO: 2535 - RNA, 20 nt, synthetic construct
  source 1..20: mol_type = other RNA
gctatcaaaacccttaaagt

SEQ ID NO: 2536 - RNA, 20 nt, synthetic construct
  source 1..20: mol_type = other RNA
caaaacccttaaagtaggct

SEQ ID NO: 2537 - RNA, 20 nt, synthetic construct
  source 1..20: mol_type = other RNA
tcaaaacccttaaagtaggc

SEQ ID NO: 2538 - RNA, 20 nt, synthetic construct
  source 1..20: mol_type = other RNA
atcaaaacccttaaagtagg

SEQ ID NO: 2539 - RNA, 20 nt, synthetic construct
  source 1..20: mol_type = other RNA
tatcaaaacccttaaagtag

SEQ ID NO: 2540 - RNA, 20 nt, synthetic construct
  source 1..20: mol_type = other RNA
ggctatcaaaacccttaaag

SEQ ID NO: 2541 - RNA, 20 nt, synthetic construct
  source 1..20: mol_type = other RNA
catcgagacctagcggctcg

SEQ ID NO: 2542 - RNA, 20 nt, synthetic construct
  source 1..20: mol_type = other RNA
atcgagacctagcggctcgg

SEQ ID NO: 2543 - RNA, 20 nt, synthetic construct
  source 1..20: mol_type = other RNA
tcgagacctagcggctcgga

SEQ ID NO: 2544 - RNA, 20 nt, synthetic construct
  source 1..20: mol_type = other RNA
cgagacctagcggctcggaa

SEQ ID NO: 2545 - RNA, 20 nt, synthetic construct
  source 1..20: mol_type = other RNA
gagacctagcggctcggaat

SEQ ID NO: 2546 - RNA, 20 nt, synthetic construct
  source 1..20: mol_type = other RNA
ctcggaatatactggtcaat

SEQ ID NO: 2547 - RNA, 20 nt, synthetic construct
  source 1..20: mol_type = other RNA
ggctcggaatatactggtca

SEQ ID NO: 2548 - RNA, 20 nt, synthetic construct
  source 1..20: mol_type = other RNA
gctcggaatatactggtcaa

SEQ ID NO: 2549 - RNA, 20 nt, synthetic construct
  source 1..20: mol_type = other RNA
tcggaatatactggtcaata

SEQ ID NO: 2550 - RNA, 20 nt, synthetic construct
  source 1..20: mol_type = other RNA
cggaatatactggtcaatag

SEQ ID NO: 2551 - RNA, 20 nt, synthetic construct
  source 1..20: mol_type = other RNA
ggaatatactggtcaatagc

SEQ ID NO: 2552 - RNA, 20 nt, synthetic construct
  source 1..20: mol_type = other RNA
gccattaaaactttgaaagg

SEQ ID NO: 2553 - RNA, 20 nt, synthetic construct
  source 1..20: mol_type = other RNA
ccattaaaactttgaaaggt

SEQ ID NO: 2554 - RNA, 20 nt, synthetic construct
  source 1..20: mol_type = other RNA
tgccattaaaactttgaaag

SEQ ID NO: 2555 - RNA, 20 nt, synthetic construct
  source 1..20: mol_type = other RNA
cattaaaactttgaaaggtg

SEQ ID NO: 2556 - RNA, 20 nt, synthetic construct
  source 1..20: mol_type = other RNA
attaaaactttgaaaggtgg

SEQ ID NO: 2557 - RNA, 20 nt, synthetic construct
  source 1..20: mol_type = other RNA
ttaaaactttgaaaggtggc

SEQ ID NO: 2558 - RNA, 20 nt, synthetic construct
  source 1..20: mol_type = other RNA
taaaactttgaaaggtggcc

SEQ ID NO: 2559 - RNA, 20 nt, synthetic construct
  source 1..20: mol_type = other RNA
gggaccttgcagctcgcaat

SEQ ID NO: 2560 - RNA, 20 nt, synthetic construct
  source 1..20: mol_type = other RNA
agggaccttgcagctcgcaa

SEQ ID NO: 2561 - RNA, 20 nt, synthetic construct
  source 1..20: mol_type = other RNA
cagggaccttgcagctcgca

SEQ ID NO: 2562 - RNA, 20 nt, synthetic construct
  source 1..20: mol_type = other RNA
acagggaccttgcagctcgc

SEQ ID NO: 2563 - RNA, 20 nt, synthetic construct
  source 1..20: mol_type = other RNA
cacagggaccttgcagctcg

SEQ ID NO: 2564 - RNA, 20 nt, synthetic construct
  source 1..20: mol_type = other RNA
ctcgcaatattcttgtcaac

SEQ ID NO: 2565 - RNA, 20 nt, synthetic construct
  source 1..20: mol_type = other RNA
gcaatattcttgtcaacagc

SEQ ID NO: 2566 - RNA, 20 nt, synthetic construct
  source 1..20: mol_type = other RNA
cgcaatattcttgtcaacag

SEQ ID NO: 2567 - RNA, 20 nt, synthetic construct
  source 1..20: mol_type = other RNA
tcgcaatattcttgtcaaca

SEQ ID NO: 2568 - RNA, 20 nt, synthetic construct
  source 1..20: mol_type = other RNA
gctcgcaatattcttgtcaa

SEQ ID NO: 2569 - RNA, 20 nt, synthetic construct
  source 1..20: mol_type = other RNA
agctcgcaatattcttgtca

SEQ ID NO: 2570 - RNA, 20 nt, synthetic construct
  source 1..20: mol_type = other RNA
tgtctgacttcgggctctca

SEQ ID NO: 2571 - RNA, 20 nt, synthetic construct
  source 1..20: mol_type = other RNA
gtctgacttcgggctctcac

SEQ ID NO: 2572 - RNA, 20 nt, synthetic construct
  source 1..20: mol_type = other RNA
tctgacttcgggctctcacg

SEQ ID NO: 2573 - RNA, 20 nt, synthetic construct
  source 1..20: mol_type = other RNA
gtgtctgacttcgggctctc

SEQ ID NO: 2574 - RNA, 20 nt, synthetic construct
  source 1..20: mol_type = other RNA
ctgacttcgggctctcacgg

SEQ ID NO: 2575 - RNA, 20 nt, synthetic construct
  source 1..20: mol_type = other RNA
cgagacctggccgcccgcaa

SEQ ID NO: 2576 - RNA, 20 nt, synthetic construct
  source 1..20: mol_type = other RNA
caccgagacctggccgcccg

SEQ ID NO: 2577 - RNA, 20 nt, synthetic construct
  source 1..20: mol_type = other RNA
accgagacctggccgcccgc

SEQ ID NO: 2578 - RNA, 20 nt, synthetic construct
  source 1..20: mol_type = other RNA
ccgagacctggccgcccgca

SEQ ID NO: 2579 - RNA, 20 nt, synthetic construct
  source 1..20: mol_type = other RNA
gagacctggccgcccgcaac

SEQ ID NO: 2580 - RNA, 20 nt, synthetic construct
  source 1..20: mol_type = other RNA
cccgcaacgtcctggttgac

SEQ ID NO: 2581 - RNA, 20 nt, synthetic construct
  source 1..20: mol_type = other RNA
cgcccgcaacgtcctggttg

SEQ ID NO: 2582 - RNA, 20 nt, synthetic construct
  source 1..20: mol_type = other RNA
gcccgcaacgtcctggttga

SEQ ID NO: 2583 - RNA, 20 nt, synthetic construct
  source 1..20: mol_type = other RNA
ccgcaacgtcctggttgaca

SEQ ID NO: 2584 - RNA, 20 nt, synthetic construct
  source 1..20: mol_type = other RNA
cgcaacgtcctggttgacag

SEQ ID NO: 2585 - RNA, 20 nt, synthetic construct
  source 1..20: mol_type = other RNA
gcaacgtcctggttgacagc

SEQ ID NO: 2586 - RNA, 20 nt, synthetic construct
  source 1..20: mol_type = other RNA
gccatcaaggccctcaaagc

SEQ ID NO: 2587 - RNA, 20 nt, synthetic construct
  source 1..20: mol_type = other RNA
ccatcaaggccctcaaagcc

SEQ ID NO: 2588 - RNA, 20 nt, synthetic construct
  source 1..20: mol_type = other RNA
ggccatcaaggccctcaaag

SEQ ID NO: 2589 - RNA, 20 nt, synthetic construct
  source 1..20: mol_type = other RNA
catcaaggccctcaaagccg

SEQ ID NO: 2590 - RNA, 20 nt, synthetic construct
  source 1..20: mol_type = other RNA
atcaaggccctcaaagccgg

SEQ ID NO: 2591 - RNA, 20 nt, synthetic construct
  source 1..20: mol_type = other RNA
tcaaggccctcaaagccggc

SEQ ID NO: 2592 - RNA, 20 nt, synthetic construct
  source 1..20: mol_type = other RNA
tgtccgactttggcctctcc

SEQ ID NO: 2593 - RNA, 20 nt, synthetic construct
  source 1..20: mol_type = other RNA
gtgtccgactttggcctctc

SEQ ID NO: 2594 - RNA, 20 nt, synthetic construct
  source 1..20: mol_type = other RNA
gtccgactttggcctctccc

SEQ ID NO: 2595 - RNA, 20 nt, synthetic construct
  source 1..20: mol_type = other RNA
tccgactttggcctctcccg

SEQ ID NO: 2596 - RNA, 20 nt, synthetic construct
  source 1..20: mol_type = other RNA
ccgactttggcctctcccgc

SEQ ID NO: 2597 - RNA, 20 nt, synthetic construct
  source 1..20: mol_type = other RNA
catcgggacctggctgctag

SEQ ID NO: 2598 - RNA, 20 nt, synthetic construct
  source 1..20: mol_type = other RNA
atcgggacctggctgctagg

SEQ ID NO: 2599 - RNA, 20 nt, synthetic construct
  source 1..20: mol_type = other RNA
tcgggacctggctgctagga

SEQ ID NO: 2600 - RNA, 20 nt, synthetic construct
  source 1..20: mol_type = other RNA
cgggacctggctgctaggaa

SEQ ID NO: 2601 - RNA, 20 nt, synthetic construct
  source 1..20: mol_type = other RNA
gggacctggctgctaggaac

SEQ ID NO: 2602 - RNA, 20 nt, synthetic construct
  source 1..20: mol_type = other RNA
ctaggaacattctggtcaac

SEQ ID NO: 2603 - RNA, 20 nt, synthetic construct
  source 1..20: mol_type = other RNA
tgctaggaacattctggtca

SEQ ID NO: 2604 - RNA, 20 nt, synthetic construct
  source 1..20: mol_type = other RNA
gctaggaacattctggtcaa

SEQ ID NO: 2605 - RNA, 20 nt, synthetic construct
  source 1..20: mol_type = other RNA
taggaacattctggtcaaca

SEQ ID NO: 2606 - RNA, 20 nt, synthetic construct
  source 1..20: mol_type = other RNA
aggaacattctggtcaacag

SEQ ID NO: 2607 - RNA, 20 nt, synthetic construct
  source 1..20: mol_type = other RNA
ggaacattctggtcaacagt

SEQ ID NO: 2608 - RNA, 20 nt, synthetic construct
  source 1..20: mol_type = other RNA
gccatcaagaccctgaaggc

SEQ ID NO: 2609 - RNA, 20 nt, synthetic construct
  source 1..20: mol_type = other RNA
ccatcaagaccctgaaggca

SEQ ID NO: 2610 - RNA, 20 nt, synthetic construct
  source 1..20: mol_type = other RNA
catcaagaccctgaaggcag

SEQ ID NO: 2611 - RNA, 20 nt, synthetic construct
  source 1..20: mol_type = other RNA
ggccatcaagaccctgaagg

SEQ ID NO: 2612 - RNA, 20 nt, synthetic construct
  source 1..20: mol_type = other RNA
atcaagaccctgaaggcagg

SEQ ID NO: 2613 - RNA, 20 nt, synthetic construct
  source 1..20: mol_type = other RNA
tcaagaccctgaaggcaggg

SEQ ID NO: 2614 - RNA, 20 nt, synthetic construct
  source 1..20: mol_type = other RNA
tgtcggactttgggctctca

SEQ ID NO: 2615 - RNA, 20 nt, synthetic construct
  source 1..20: mol_type = other RNA
gtgtcggactttgggctctc

SEQ ID NO: 2616 - RNA, 20 nt, synthetic construct
  source 1..20: mol_type = other RNA
gtcggactttgggctctcac

SEQ ID NO: 2617 - RNA, 20 nt, synthetic construct
  source 1..20: mol_type = other RNA
tcggactttgggctctcacg

SEQ ID NO: 2618 - RNA, 20 nt, synthetic construct
  source 1..20: mol_type = other RNA
cggactttgggctctcacgc

SEQ ID NO: 2619 - RNA, 20 nt, synthetic construct
  source 1..20: mol_type = other RNA
ggccatcaagacgctcaagt

SEQ ID NO: 2620 - RNA, 20 nt, synthetic construct
  source 1..20: mol_type = other RNA
gccatcaagacgctcaagtc

SEQ ID NO: 2621 - RNA, 20 nt, synthetic construct
  source 1..20: mol_type = other RNA
ccatcaagacgctcaagtcg

SEQ ID NO: 2622 - RNA, 20 nt, synthetic construct
  source 1..20: mol_type = other RNA
catcaagacgctcaagtcgg

SEQ ID NO: 2623 - RNA, 20 nt, synthetic construct
  source 1..20: mol_type = other RNA
atcaagacgctcaagtcggg

SEQ ID NO: 2624 - RNA, 20 nt, synthetic construct
  source 1..20: mol_type = other RNA
tcaagacgctcaagtcgggc

SEQ ID NO: 2625 - RNA, 20 nt, synthetic construct
  source 1..20: mol_type = other RNA
tctcagactttggcctctcc

SEQ ID NO: 2626 - RNA, 20 nt, synthetic construct
  source 1..20: mol_type = other RNA
gtctcagactttggcctctc

SEQ ID NO: 2627 - RNA, 20 nt, synthetic construct
  source 1..20: mol_type = other RNA
ctcagactttggcctctccc

SEQ ID NO: 2628 - RNA, 20 nt, synthetic construct
  source 1..20: mol_type = other RNA
tcagactttggcctctcccg

SEQ ID NO: 2629 - RNA, 20 nt, synthetic construct
  source 1..20: mol_type = other RNA
cagactttggcctctcccgc

SEQ ID NO: 2630 - RNA, 20 nt, synthetic construct
  source 1..20: mol_type = other RNA
caccgcgacctggctgctcg

SEQ ID NO: 2631 - RNA, 20 nt, synthetic construct
  source 1..20: mol_type = other RNA
accgcgacctggctgctcgc

SEQ ID NO: 2632 - RNA, 20 nt, synthetic construct
  source 1..20: mol_type = other RNA
ccgcgacctggctgctcgca

SEQ ID NO: 2633 - RNA, 20 nt, synthetic construct
  source 1..20: mol_type = other RNA
cgcgacctggctgctcgcaa

SEQ ID NO: 2634 - RNA, 20 nt, synthetic construct
  source 1..20: mol_type = other RNA
gcgacctggctgctcgcaac

SEQ ID NO: 2635 - RNA, 20 nt, synthetic construct
  source 1..20: mol_type = other RNA
ctcgcaacatccttgtcaac

SEQ ID NO: 2636 - RNA, 20 nt, synthetic construct
  source 1..20: mol_type = other RNA
tgctcgcaacatccttgtca

SEQ ID NO: 2637 - RNA, 20 nt, synthetic construct
  source 1..20: mol_type = other RNA
gctcgcaacatccttgtcaa

SEQ ID NO: 2638 - RNA, 20 nt, synthetic construct
  source 1..20: mol_type = other RNA
tcgcaacatccttgtcaaca

SEQ ID NO: 2639 - RNA, 20 nt, synthetic construct
  source 1..20: mol_type = other RNA
cgcaacatccttgtcaacag

SEQ ID NO: 2640 - RNA, 20 nt, synthetic construct
  source 1..20: mol_type = other RNA
gcaacatccttgtcaacagc

SEQ ID NO: 2641 - RNA, 20 nt, synthetic construct
  source 1..20: mol_type = other RNA
ggccatcaagacgctgaagg

SEQ ID NO: 2642 - RNA, 20 nt, synthetic construct
  source 1..20: mol_type = other RNA
gccatcaagacgctgaaggt

SEQ ID NO: 2643 - RNA, 20 nt, synthetic construct
  source 1..20: mol_type = other RNA
ccatcaagacgctgaaggtg

SEQ ID NO: 2644 - RNA, 20 nt, synthetic construct
  source 1..20: mol_type = other RNA
catcaagacgctgaaggtgg

SEQ ID NO: 2645 - RNA, 20 nt, synthetic construct
  source 1..20: mol_type = other RNA
atcaagacgctgaaggtggg

SEQ ID NO: 2646 - RNA, 20 nt, synthetic construct
  source 1..20: mol_type = other RNA
tcaagacgctgaaggtgggc

SEQ ID NO: 2647 - RNA, 20 nt, synthetic construct
  source 1..20: mol_type = other RNA
tgtctgactttggcctttcc

SEQ ID NO: 2648 - RNA, 20 nt, synthetic construct
  source 1..20: mol_type = other RNA
ctgactttggcctttcccga

SEQ ID NO: 2649 - RNA, 20 nt, synthetic construct
  source 1..20: mol_type = other RNA
tctgactttggcctttcccg

SEQ ID NO: 2650 - RNA, 20 nt, synthetic construct
  source 1..20: mol_type = other RNA
gtctgactttggcctttccc

SEQ ID NO: 2651 - RNA, 20 nt, synthetic construct
  source 1..20: mol_type = other RNA
gtgtctgactttggcctttc

SEQ ID NO: 2652 - RNA, 20 nt, synthetic construct
  source 1..20: mol_type = other RNA
gagacctggctgctcgcaac

SEQ ID NO: 2653 - RNA, 20 nt, synthetic construct
  source 1..20: mol_type = other RNA
cgagacctggctgctcgcaa

SEQ ID NO: 2654 - RNA, 20 nt, synthetic construct
  source 1..20: mol_type = other RNA
ccgagacctggctgctcgca

SEQ ID NO: 2655 - RNA, 20 nt, synthetic construct
  source 1..20: mol_type = other RNA
accgagacctggctgctcgc

SEQ ID NO: 2656 - RNA, 20 nt, synthetic construct
  source 1..20: mol_type = other RNA
ctcgcaacatcctagtcaac

SEQ ID NO: 2657 - RNA, 20 nt, synthetic construct
  source 1..20: mol_type = other RNA
gcaacatcctagtcaacagc

SEQ ID NO: 2658 - RNA, 20 nt, synthetic construct
  source 1..20: mol_type = other RNA
cgcaacatcctagtcaacag

SEQ ID NO: 2659 - RNA, 20 nt, synthetic construct
  source 1..20: mol_type = other RNA
tcgcaacatcctagtcaaca

SEQ ID NO: 2660 - RNA, 20 nt, synthetic construct
  source 1..20: mol_type = other RNA
gctcgcaacatcctagtcaa

SEQ ID NO: 2661 - RNA, 20 nt, synthetic construct
  source 1..20: mol_type = other RNA
tgctcgcaacatcctagtca

SEQ ID NO: 2662 - RNA, 20 nt, synthetic construct
  source 1..20: mol_type = other RNA
caatcaagaccctgaagggt

SEQ ID NO: 2663 - RNA, 20 nt, synthetic construct
  source 1..20: mol_type = other RNA
gcaatcaagaccctgaaggg

SEQ ID NO: 2664 - RNA, 20 nt, synthetic construct
  source 1..20: mol_type = other RNA
tcaagaccctgaagggtggc

SEQ ID NO: 2665 - RNA, 20 nt, synthetic construct
  source 1..20: mol_type = other RNA
atcaagaccctgaagggtgg

SEQ ID NO: 2666 - RNA, 20 nt, synthetic construct
  source 1..20: mol_type = other RNA
aatcaagaccctgaagggtg

SEQ ID NO: 2667 - RNA, 20 nt, synthetic construct
  source 1..20: mol_type = other RNA
ggcaatcaagaccctgaagg

SEQ ID NO: 2668 - RNA, 20 nt, synthetic construct
  source 1..20: mol_type = other RNA
ttacagacttcgggctggct

SEQ ID NO: 2669 - RNA, 20 nt, synthetic construct
  source 1..20: mol_type = other RNA
tacagacttcgggctggctc

SEQ ID NO: 2670 - RNA, 20 nt, synthetic construct
  source 1..20: mol_type = other RNA
attacagacttcgggctggc

SEQ ID NO: 2671 - RNA, 20 nt, synthetic construct
  source 1..20: mol_type = other RNA
acagacttcgggctggctcg

SEQ ID NO: 2672 - RNA, 20 nt, synthetic construct
  source 1..20: mol_type = other RNA
cagacttcgggctggctcgg

SEQ ID NO: 2673 - RNA, 20 nt, synthetic construct
  source 1..20: mol_type = other RNA
agggacttggccgctcggaa

SEQ ID NO: 2674 - RNA, 20 nt, synthetic construct
  source 1..20: mol_type = other RNA
cacagggacttggccgctcg

SEQ ID NO: 2675 - RNA, 20 nt, synthetic construct
  source 1..20: mol_type = other RNA
acagggacttggccgctcgg

SEQ ID NO: 2676 - RNA, 20 nt, synthetic construct
  source 1..20: mol_type = other RNA
cagggacttggccgctcgga

SEQ ID NO: 2677 - RNA, 20 nt, synthetic construct
  source 1..20: mol_type = other RNA
gggacttggccgctcggaac

SEQ ID NO: 2678 - RNA, 20 nt, synthetic construct
  source 1..20: mol_type = other RNA
cgctcggaacgtgctggtca

SEQ ID NO: 2679 - RNA, 20 nt, synthetic construct
  source 1..20: mol_type = other RNA
ctcggaacgtgctggtcaag

SEQ ID NO: 2680 - RNA, 20 nt, synthetic construct
  source 1..20: mol_type = other RNA
gctcggaacgtgctggtcaa

SEQ ID NO: 2681 - RNA, 20 nt, synthetic construct
  source 1..20: mol_type = other RNA
tcggaacgtgctggtcaaga

SEQ ID NO: 2682 - RNA, 20 nt, synthetic construct
  source 1..20: mol_type = other RNA
cggaacgtgctggtcaagag

SEQ ID NO: 2683 - RNA, 20 nt, synthetic construct
  source 1..20: mol_type = other RNA
ggaacgtgctggtcaagagt

SEQ ID NO: 2684 - RNA, 20 nt, synthetic construct
  source 1..20: mol_type = other RNA
ggccatcaaagtgttgaggg

SEQ ID NO: 2685 - RNA, 20 nt, synthetic construct
  source 1..20: mol_type = other RNA
gccatcaaagtgttgaggga

SEQ ID NO: 2686 - RNA, 20 nt, synthetic construct
  source 1..20: mol_type = other RNA
ccatcaaagtgttgagggaa

SEQ ID NO: 2687 - RNA, 20 nt, synthetic construct
  source 1..20: mol_type = other RNA
catcaaagtgttgagggaaa

SEQ ID NO: 2688 - RNA, 20 nt, synthetic construct
  source 1..20: mol_type = other RNA
atcaaagtgttgagggaaaa

SEQ ID NO: 2689 - RNA, 20 nt, synthetic construct
  source 1..20: mol_type = other RNA
tcaaagtgttgagggaaaac

SEQ ID NO: 2690 - RNA, 20 nt, synthetic construct
  source 1..20: mol_type = other RNA
caaagtgttgagggaaaaca

SEQ ID NO: 2691 - RNA, 20 nt, synthetic construct
  source 1..20: mol_type = other RNA
tgcccgaaacgtgctactca

SEQ ID NO: 2692 - RNA, 20 nt, synthetic construct
  source 1..20: mol_type = other RNA
gcccgaaacgtgctactcaa

SEQ ID NO: 2693 - RNA, 20 nt, synthetic construct
  source 1..20: mol_type = other RNA
cccgaaacgtgctactcaag

SEQ ID NO: 2694 - RNA, 20 nt, synthetic construct
  source 1..20: mol_type = other RNA
ccgaaacgtgctactcaagt

SEQ ID NO: 2695 - RNA, 20 nt, synthetic construct
  source 1..20: mol_type = other RNA
cgaaacgtgctactcaagtc

SEQ ID NO: 2696 - RNA, 20 nt, synthetic construct
  source 1..20: mol_type = other RNA
gaaacgtgctactcaagtca

SEQ ID NO: 2697 - RNA, 20 nt, synthetic construct
  source 1..20: mol_type = other RNA
cattaaagtcattgaggaca

SEQ ID NO: 2698 - RNA, 20 nt, synthetic construct
  source 1..20: mol_type = other RNA
ttaaagtcattgaggacaag

SEQ ID NO: 2699 - RNA, 20 nt, synthetic construct
  source 1..20: mol_type = other RNA
ctgcattaaagtcattgagg

SEQ ID NO: 2700 - RNA, 20 nt, synthetic construct
  source 1..20: mol_type = other RNA
tgcattaaagtcattgagga

SEQ ID NO: 2701 - RNA, 20 nt, synthetic construct
  source 1..20: mol_type = other RNA
gcattaaagtcattgaggac

SEQ ID NO: 2702 - RNA, 20 nt, synthetic construct
  source 1..20: mol_type = other RNA
attaaagtcattgaggacaa

SEQ ID NO: 2703 - RNA, 20 nt, synthetic construct
  source 1..20: mol_type = other RNA
taaagtcattgaggacaaga

SEQ ID NO: 2704 - RNA, 20 nt, synthetic construct
  source 1..20: mol_type = other RNA
cgggatttggcagcccgtaa

SEQ ID NO: 2705 - RNA, 20 nt, synthetic construct
  source 1..20: mol_type = other RNA
gggatttggcagcccgtaat

SEQ ID NO: 2706 - RNA, 20 nt, synthetic construct
  source 1..20: mol_type = other RNA
tcgggatttggcagcccgta

SEQ ID NO: 2707 - RNA, 20 nt, synthetic construct
  source 1..20: mol_type = other RNA
atcgggatttggcagcccgt

SEQ ID NO: 2708 - RNA, 20 nt, synthetic construct
  source 1..20: mol_type = other RNA
catcgggatttggcagcccg

SEQ ID NO: 2709 - RNA, 20 nt, synthetic construct
  source 1..20: mol_type = other RNA
gtaatgtcttagtgaaatct

SEQ ID NO: 2710 - RNA, 20 nt, synthetic construct
  source 1..20: mol_type = other RNA
cgtaatgtcttagtgaaatc

SEQ ID NO: 2711 - RNA, 20 nt, synthetic construct
  source 1..20: mol_type = other RNA
ccgtaatgtcttagtgaaat

SEQ ID NO: 2712 - RNA, 20 nt, synthetic construct
  source 1..20: mol_type = other RNA
cccgtaatgtcttagtgaaa

SEQ ID NO: 2713 - RNA, 20 nt, synthetic construct
  source 1..20: mol_type = other RNA
gcccgtaatgtcttagtgaa

SEQ ID NO: 2714 - RNA, 20 nt, synthetic construct
  source 1..20: mol_type = other RNA
agcccgtaatgtcttagtga

SEQ ID NO: 2715 - RNA, 20 nt, synthetic construct
  source 1..20: mol_type = other RNA
ggctattaagattcttaatg

SEQ ID NO: 2716 - RNA, 20 nt, synthetic construct
  source 1..20: mol_type = other RNA
ttaagattcttaatgagaca

SEQ ID NO: 2717 - RNA, 20 nt, synthetic construct
  source 1..20: mol_type = other RNA
attaagattcttaatgagac

SEQ ID NO: 2718 - RNA, 20 nt, synthetic construct
  source 1..20: mol_type = other RNA
tattaagattcttaatgaga

SEQ ID NO: 2719 - RNA, 20 nt, synthetic construct
  source 1..20: mol_type = other RNA
ctattaagattcttaatgag

SEQ ID NO: 2720 - RNA, 20 nt, synthetic construct
  source 1..20: mol_type = other RNA
gctattaagattcttaatga

SEQ ID NO: 2721 - RNA, 20 nt, synthetic construct
  source 1..20: mol_type = other RNA
ctccgactttggcctctgca

SEQ ID NO: 2722 - RNA, 20 nt, synthetic construct
  source 1..20: mol_type = other RNA
ccgactttggcctctgcaag

SEQ ID NO: 2723 - RNA, 20 nt, synthetic construct
  source 1..20: mol_type = other RNA
tccgactttggcctctgcaa

SEQ ID NO: 2724 - RNA, 20 nt, synthetic construct
  source 1..20: mol_type = other RNA
tctccgactttggcctctgc

SEQ ID NO: 2725 - RNA, 20 nt, synthetic construct
  source 1..20: mol_type = other RNA
atctccgactttggcctctg

SEQ ID NO: 2726 - RNA, 20 nt, synthetic construct
  source 1..20: mol_type = other RNA
gagacctaaagccacacaac

SEQ ID NO: 2727 - RNA, 20 nt, synthetic construct
  source 1..20: mol_type = other RNA
agagacctaaagccacacaa

SEQ ID NO: 2728 - RNA, 20 nt, synthetic construct
  source 1..20: mol_type = other RNA
cagagacctaaagccacaca

SEQ ID NO: 2729 - RNA, 20 nt, synthetic construct
  source 1..20: mol_type = other RNA
acagagacctaaagccacac

SEQ ID NO: 2730 - RNA, 20 nt, synthetic construct
  source 1..20: mol_type = other RNA
cacagagacctaaagccaca

SEQ ID NO: 2731 - RNA, 20 nt, synthetic construct
  source 1..20: mol_type = other RNA
acacaacatcctcatatcca

SEQ ID NO: 2732 - RNA, 20 nt, synthetic construct
  source 1..20: mol_type = other RNA
acaacatcctcatatccatg

SEQ ID NO: 2733 - RNA, 20 nt, synthetic construct
  source 1..20: mol_type = other RNA
cacaacatcctcatatccat

SEQ ID NO: 2734 - RNA, 20 nt, synthetic construct
  source 1..20: mol_type = other RNA
cacacaacatcctcatatcc

SEQ ID NO: 2735 - RNA, 20 nt, synthetic construct
  source 1..20: mol_type = other RNA
ccacacaacatcctcatatc

SEQ ID NO: 2736 - RNA, 20 nt, synthetic construct
  source 1..20: mol_type = other RNA
gccacacaacatcctcatat

SEQ ID NO: 2737 - RNA, 20 nt, synthetic construct
  source 1..20: mol_type = other RNA
tgaagaggatcctccccgag

SEQ ID NO: 2738 - RNA, 20 nt, synthetic construct
  source 1..20: mol_type = other RNA
cgtgaagaggatcctccccg

SEQ ID NO: 2739 - RNA, 20 nt, synthetic construct
  source 1..20: mol_type = other RNA
gccgtgaagaggatcctccc

SEQ ID NO: 2740 - RNA, 20 nt, synthetic construct
  source 1..20: mol_type = other RNA
gtgaagaggatcctccccga

SEQ ID NO: 2741 - RNA, 20 nt, synthetic construct
  source 1..20: mol_type = other RNA
ccgtgaagaggatcctcccc

SEQ ID NO: 2742 - RNA, 20 nt, synthetic construct
  source 1..20: mol_type = other RNA
ggccgtgaagaggatcctcc

SEQ ID NO: 2743 - RNA, 20 nt, synthetic construct
  source 1..20: mol_type = other RNA
ctcagacttcggcctctgca

SEQ ID NO: 2744 - RNA, 20 nt, synthetic construct
  source 1..20: mol_type = other RNA
cagacttcggcctctgcaag

SEQ ID NO: 2745 - RNA, 20 nt, synthetic construct
  source 1..20: mol_type = other RNA
tcagacttcggcctctgcaa

SEQ ID NO: 2746 - RNA, 20 nt, synthetic construct
  source 1..20: mol_type = other RNA
tctcagacttcggcctctgc

SEQ ID NO: 2747 - RNA, 20 nt, synthetic construct
  source 1..20: mol_type = other RNA
ctctcagacttcggcctctg

SEQ ID NO: 2748 - RNA, 20 nt, synthetic construct
  source 1..20: mol_type = other RNA
gggacctgaagccaggaaat

SEQ ID NO: 2749 - RNA, 20 nt, synthetic construct
  source 1..20: mol_type = other RNA
cgggacctgaagccaggaaa

SEQ ID NO: 2750 - RNA, 20 nt, synthetic construct
  source 1..20: mol_type = other RNA
ccgggacctgaagccaggaa

SEQ ID NO: 2751 - RNA, 20 nt, synthetic construct
  source 1..20: mol_type = other RNA
accgggacctgaagccagga

SEQ ID NO: 2752 - RNA, 20 nt, synthetic construct
  source 1..20: mol_type = other RNA
caccgggacctgaagccagg

SEQ ID NO: 2753 - RNA, 20 nt, synthetic construct
  source 1..20: mol_type = other RNA
aggaaatattctcatcaccg

SEQ ID NO: 2754 - RNA, 20 nt, synthetic construct
  source 1..20: mol_type = other RNA
caggaaatattctcatcacc

SEQ ID NO: 2755 - RNA, 20 nt, synthetic construct
  source 1..20: mol_type = other RNA
ccaggaaatattctcatcac

SEQ ID NO: 2756 - RNA, 20 nt, synthetic construct
  source 1..20: mol_type = other RNA
gaaatattctcatcaccggg

SEQ ID NO: 2757 - RNA, 20 nt, synthetic construct
  source 1..20: mol_type = other RNA
ggaaatattctcatcaccgg

SEQ ID NO: 2758 - RNA, 20 nt, synthetic construct
  source 1..20: mol_type = other RNA
gccaggaaatattctcatca

SEQ ID NO: 2759 - RNA, 20 nt, synthetic construct
  source 1..20: mol_type = other RNA
tcaagcggctcctccgcgag

SEQ ID NO: 2760 - RNA, 20 nt, synthetic construct
  source 1..20: mol_type = other RNA
tgtcaagcggctcctccgcg

SEQ ID NO: 2761 - RNA, 20 nt, synthetic construct
  source 1..20: mol_type = other RNA
gctgtcaagcggctcctccg

SEQ ID NO: 2762 - RNA, 20 nt, synthetic construct
  source 1..20: mol_type = other RNA
gtcaagcggctcctccgcga

SEQ ID NO: 2763 - RNA, 20 nt, synthetic construct
  source 1..20: mol_type = other RNA
ctgtcaagcggctcctccgc

SEQ ID NO: 2764 - RNA, 20 nt, synthetic construct
  source 1..20: mol_type = other RNA
ggctgtcaagcggctcctcc

SEQ ID NO: 2765 - RNA, 20 nt, synthetic construct
  source 1..20: mol_type = other RNA
ttcattgattatgaatattc

SEQ ID NO: 2766 - RNA, 20 nt, synthetic construct
  source 1..20: mol_type = other RNA
tcattgattatgaatattct

SEQ ID NO: 2767 - RNA, 20 nt, synthetic construct
  source 1..20: mol_type = other RNA
cattgattatgaatattctg

SEQ ID NO: 2768 - RNA, 20 nt, synthetic construct
  source 1..20: mol_type = other RNA
attgattatgaatattctgg

SEQ ID NO: 2769 - RNA, 20 nt, synthetic construct
  source 1..20: mol_type = other RNA
ttgattatgaatattctgga

SEQ ID NO: 2770 - RNA, 20 nt, synthetic construct
  source 1..20: mol_type = other RNA
cataatgacctattgtgtaa

SEQ ID NO: 2771 - RNA, 20 nt, synthetic construct
  source 1..20: mol_type = other RNA
ataatgacctattgtgtaag

SEQ ID NO: 2772 - RNA, 20 nt, synthetic construct
  source 1..20: mol_type = other RNA
taatgacctattgtgtaaga

SEQ ID NO: 2773 - RNA, 20 nt, synthetic construct
  source 1..20: mol_type = other RNA
aatgacctattgtgtaagaa

SEQ ID NO: 2774 - RNA, 20 nt, synthetic construct
  source 1..20: mol_type = other RNA
atgacctattgtgtaagaat

SEQ ID NO: 2775 - RNA, 20 nt, synthetic construct
  source 1..20: mol_type = other RNA
tgtaagaatataatctacaa

SEQ ID NO: 2776 - RNA, 20 nt, synthetic construct
  source 1..20: mol_type = other RNA
taagaatataatctacaatg

SEQ ID NO: 2777 - RNA, 20 nt, synthetic construct
  source 1..20: mol_type = other RNA
gtgtaagaatataatctaca

SEQ ID NO: 2778 - RNA, 20 nt, synthetic construct
  source 1..20: mol_type = other RNA
gtaagaatataatctacaat

SEQ ID NO: 2779 - RNA, 20 nt, synthetic construct
  source 1..20: mol_type = other RNA
aagaatataatctacaatga

SEQ ID NO: 2780 - RNA, 20 nt, synthetic construct
  source 1..20: mol_type = other RNA
agaatataatctacaatgag

SEQ ID NO: 2781 - RNA, 20 nt, synthetic construct
  source 1..20: mol_type = other RNA
tcattgactatgaatatgct

SEQ ID NO: 2782 - RNA, 20 nt, synthetic construct
  source 1..20: mol_type = other RNA
ttcattgactatgaatatgc

SEQ ID NO: 2783 - RNA, 20 nt, synthetic construct
  source 1..20: mol_type = other RNA
ttgactatgaatatgctggc

SEQ ID NO: 2784 - RNA, 20 nt, synthetic construct
  source 1..20: mol_type = other RNA
attgactatgaatatgctgg

SEQ ID NO: 2785 - RNA, 20 nt, synthetic construct
  source 1..20: mol_type = other RNA
cattgactatgaatatgctg

SEQ ID NO: 2786 - RNA, 20 nt, synthetic construct
  source 1..20: mol_type = other RNA
atgacctgctctgcaagaat

SEQ ID NO: 2787 - RNA, 20 nt, synthetic construct
  source 1..20: mol_type = other RNA
aatgacctgctctgcaagaa

SEQ ID NO: 2788 - RNA, 20 nt, synthetic construct
  source 1..20: mol_type = other RNA
caatgacctgctctgcaaga

SEQ ID NO: 2789 - RNA, 20 nt, synthetic construct
  source 1..20: mol_type = other RNA
acaatgacctgctctgcaag

SEQ ID NO: 2790 - RNA, 20 nt, synthetic construct
  source 1..20: mol_type = other RNA
cacaatgacctgctctgcaa

SEQ ID NO: 2791 - RNA, 20 nt, synthetic construct
  source 1..20: mol_type = other RNA
gcaagaatatcatctatgac

SEQ ID NO: 2792 - RNA, 20 nt, synthetic construct
  source 1..20: mol_type = other RNA
agaatatcatctatgacagc

SEQ ID NO: 2793 - RNA, 20 nt, synthetic construct
  source 1..20: mol_type = other RNA
aagaatatcatctatgacag

SEQ ID NO: 2794 - RNA, 20 nt, synthetic construct
  source 1..20: mol_type = other RNA
caagaatatcatctatgaca

SEQ ID NO: 2795 - RNA, 20 nt, synthetic construct
  source 1..20: mol_type = other RNA
tgcaagaatatcatctatga

SEQ ID NO: 2796 - RNA, 20 nt, synthetic construct
  source 1..20: mol_type = other RNA
ctgcaagaatatcatctatg

SEQ ID NO: 2797 - RNA, 20 nt, synthetic construct
  source 1..20: mol_type = other RNA
cttgacaacgccagagggtg

SEQ ID NO: 2798 - RNA, 20 nt, synthetic construct
  source 1..20: mol_type = other RNA
accttgacaacgccagaggg

SEQ ID NO: 2799 - RNA, 20 nt, synthetic construct
  source 1..20: mol_type = other RNA
ttgacaacgccagagggtga

SEQ ID NO: 2800 - RNA, 20 nt, synthetic construct
  source 1..20: mol_type = other RNA
ccttgacaacgccagagggt

SEQ ID NO: 2801 - RNA, 20 nt, synthetic construct
  source 1..20: mol_type = other RNA
caccttgacaacgccagagg

SEQ ID NO: 2802 - RNA, 20 nt, synthetic construct
  source 1..20: mol_type = other RNA
tatggaccggcaccattatg

SEQ ID NO: 2803 - RNA, 20 nt, synthetic construct
  source 1..20: mol_type = other RNA
aatatggaccggcaccatta

SEQ ID NO: 2804 - RNA, 20 nt, synthetic construct
  source 1..20: mol_type = other RNA
tggaccggcaccattatgag

SEQ ID NO: 2805 - RNA, 20 nt, synthetic construct
  source 1..20: mol_type = other RNA
atggaccggcaccattatga

SEQ ID NO: 2806 - RNA, 20 nt, synthetic construct
  source 1..20: mol_type = other RNA
atatggaccggcaccattat

SEQ ID NO: 2807 - RNA, 20 nt, synthetic construct
  source 1..20: mol_type = other RNA
gttcaaacccatgaggtaag

SEQ ID NO: 2808 - RNA, 20 nt, synthetic construct
  source 1..20: mol_type = other RNA
atgttcaaacccatgaggta

SEQ ID NO: 2809 - RNA, 20 nt, synthetic construct
  source 1..20: mol_type = other RNA
caaacccatgaggtaagtga

SEQ ID NO: 2810 - RNA, 20 nt, synthetic construct
  source 1..20: mol_type = other RNA
tcaaacccatgaggtaagtg

SEQ ID NO: 2811 - RNA, 20 nt, synthetic construct
  source 1..20: mol_type = other RNA
ttcaaacccatgaggtaagt

SEQ ID NO: 2812 - RNA, 20 nt, synthetic construct
  source 1..20: mol_type = other RNA
tgttcaaacccatgaggtaa

SEQ ID NO: 2813 - RNA, 20 nt, synthetic construct
  source 1..20: mol_type = other RNA
catgttcaaacccatgaggt

SEQ ID NO: 2814 - RNA, 20 nt, synthetic construct
  source 1..20: mol_type = other RNA
ttcttgataatgccaaaagg

SEQ ID NO: 2815 - RNA, 20 nt, synthetic construct
  source 1..20: mol_type = other RNA
cttgataatgccaaaaggtg

SEQ ID NO: 2816 - RNA, 20 nt, synthetic construct
  source 1..20: mol_type = other RNA
cttcttgataatgccaaaag

SEQ ID NO: 2817 - RNA, 20 nt, synthetic construct
  source 1..20: mol_type = other RNA
tcttgataatgccaaaaggt

SEQ ID NO: 2818 - RNA, 20 nt, synthetic construct
  source 1..20: mol_type = other RNA
ttgataatgccaaaaggtga

SEQ ID NO: 2819 - RNA, 20 nt, synthetic construct
  source 1..20: mol_type = other RNA
aatgctgaccgccatcacta

SEQ ID NO: 2820 - RNA, 20 nt, synthetic construct
  source 1..20: mol_type = other RNA
tgctgaccgccatcactatg

SEQ ID NO: 2821 - RNA, 20 nt, synthetic construct
  source 1..20: mol_type = other RNA
ctgaccgccatcactatgag

SEQ ID NO: 2822 - RNA, 20 nt, synthetic construct
  source 1..20: mol_type = other RNA
atgctgaccgccatcactat

SEQ ID NO: 2823 - RNA, 20 nt, synthetic construct
  source 1..20: mol_type = other RNA
gctgaccgccatcactatga

SEQ ID NO: 2824 - RNA, 20 nt, synthetic construct
  source 1..20: mol_type = other RNA
caaacctaagcggtaagttt

SEQ ID NO: 2825 - RNA, 20 nt, synthetic construct
  source 1..20: mol_type = other RNA
tttcaaacctaagcggtaag

SEQ ID NO: 2826 - RNA, 20 nt, synthetic construct
  source 1..20: mol_type = other RNA
ttcaaacctaagcggtaagt

SEQ ID NO: 2827 - RNA, 20 nt, synthetic construct
  source 1..20: mol_type = other RNA
tcaaacctaagcggtaagtt

SEQ ID NO: 2828 - RNA, 20 nt, synthetic construct
  source 1..20: mol_type = other RNA
acttagacaatggaagaggg

SEQ ID NO: 2829 - RNA, 20 nt, synthetic construct
  source 1..20: mol_type = other RNA
ttagacaatggaagagggtg

SEQ ID NO: 2830 - RNA, 20 nt, synthetic construct
  source 1..20: mol_type = other RNA
cacttagacaatggaagagg

SEQ ID NO: 2831 - RNA, 20 nt, synthetic construct
  source 1..20: mol_type = other RNA
cttagacaatggaagagggt

SEQ ID NO: 2832 - RNA, 20 nt, synthetic construct
  source 1..20: mol_type = other RNA
tagacaatggaagagggtga

SEQ ID NO: 2833 - RNA, 20 nt, synthetic construct
  source 1..20: mol_type = other RNA
aacatggaccgtcaccacta

SEQ ID NO: 2834 - RNA, 20 nt, synthetic construct
  source 1..20: mol_type = other RNA
catggaccgtcaccactacg

SEQ ID NO: 2835 - RNA, 20 nt, synthetic construct
  source 1..20: mol_type = other RNA
acatggaccgtcaccactac

SEQ ID NO: 2836 - RNA, 20 nt, synthetic construct
  source 1..20: mol_type = other RNA
atggaccgtcaccactacga

SEQ ID NO: 2837 - RNA, 20 nt, synthetic construct
  source 1..20: mol_type = other RNA
tggaccgtcaccactacgag

SEQ ID NO: 2838 - RNA, 20 nt, synthetic construct
  source 1..20: mol_type = other RNA
ctgttcaaacccatgaagta

SEQ ID NO: 2839 - RNA, 20 nt, synthetic construct
  source 1..20: mol_type = other RNA
gttcaaacccatgaagtaag

SEQ ID NO: 2840 - RNA, 20 nt, synthetic construct
  source 1..20: mol_type = other RNA
caaacccatgaagtaagtgc

SEQ ID NO: 2841 - RNA, 20 nt, synthetic construct
  source 1..20: mol_type = other RNA
gctgttcaaacccatgaagt

SEQ ID NO: 2842 - RNA, 20 nt, synthetic construct
  source 1..20: mol_type = other RNA
tgttcaaacccatgaagtaa

SEQ ID NO: 2843 - RNA, 20 nt, synthetic construct
  source 1..20: mol_type = other RNA
ttcaaacccatgaagtaagt

SEQ ID NO: 2844 - RNA, 20 nt, synthetic construct
  source 1..20: mol_type = other RNA
tcaaacccatgaagtaagtg

SEQ ID NO: 2845 - RNA, 20 nt, synthetic construct
  source 1..20: mol_type = other RNA
tcagtgactttggaatgtct

SEQ ID NO: 2846 - RNA, 20 nt, synthetic construct
  source 1..20: mol_type = other RNA
atcagtgactttggaatgtc

SEQ ID NO: 2847 - RNA, 20 nt, synthetic construct
  source 1..20: mol_type = other RNA
cagtgactttggaatgtctc

SEQ ID NO: 2848 - RNA, 20 nt, synthetic construct
  source 1..20: mol_type = other RNA
agtgactttggaatgtctcg

SEQ ID NO: 2849 - RNA, 20 nt, synthetic construct
  source 1..20: mol_type = other RNA
gtgactttggaatgtctcgt

SEQ ID NO: 2850 - RNA, 20 nt, synthetic construct
  source 1..20: mol_type = other RNA
gggaccttgctgcaagaaac

SEQ ID NO: 2851 - RNA, 20 nt, synthetic construct
  source 1..20: mol_type = other RNA
cctagggaccttgctgcaag

SEQ ID NO: 2852 - RNA, 20 nt, synthetic construct
  source 1..20: mol_type = other RNA
ctagggaccttgctgcaaga

SEQ ID NO: 2853 - RNA, 20 nt, synthetic construct
  source 1..20: mol_type = other RNA
tagggaccttgctgcaagaa

SEQ ID NO: 2854 - RNA, 20 nt, synthetic construct
  source 1..20: mol_type = other RNA
agggaccttgctgcaagaaa

SEQ ID NO: 2855 - RNA, 20 nt, synthetic construct
  source 1..20: mol_type = other RNA
gcaagaaactgcctggtagg

SEQ ID NO: 2856 - RNA, 20 nt, synthetic construct
  source 1..20: mol_type = other RNA
tgcaagaaactgcctggtag

SEQ ID NO: 2857 - RNA, 20 nt, synthetic construct
  source 1..20: mol_type = other RNA
caagaaactgcctggtaggt

SEQ ID NO: 2858 - RNA, 20 nt, synthetic construct
  source 1..20: mol_type = other RNA
aagaaactgcctggtaggtg

SEQ ID NO: 2859 - RNA, 20 nt, synthetic construct
  source 1..20: mol_type = other RNA
agaaactgcctggtaggtga

SEQ ID NO: 2860 - RNA, 20 nt, synthetic construct
  source 1..20: mol_type = other RNA
gaaactgcctggtaggtgaa

SEQ ID NO: 2861 - RNA, 20 nt, synthetic construct
  source 1..20: mol_type = other RNA
gctgttaaaacatgtaaaga

SEQ ID NO: 2862 - RNA, 20 nt, synthetic construct
  source 1..20: mol_type = other RNA
tgctgttaaaacatgtaaag

SEQ ID NO: 2863 - RNA, 20 nt, synthetic construct
  source 1..20: mol_type = other RNA
ctgttaaaacatgtaaagaa

SEQ ID NO: 2864 - RNA, 20 nt, synthetic construct
  source 1..20: mol_type = other RNA
tgttaaaacatgtaaagaag

SEQ ID NO: 2865 - RNA, 20 nt, synthetic construct
  source 1..20: mol_type = other RNA
gttaaaacatgtaaagaaga

SEQ ID NO: 2866 - RNA, 20 nt, synthetic construct
  source 1..20: mol_type = other RNA
ttaaaacatgtaaagaagat

SEQ ID NO: 2867 - RNA, 20 nt, synthetic construct
  source 1..20: mol_type = other RNA
taaaacatgtaaagaagatc

SEQ ID NO: 2868 - RNA, 20 nt, synthetic construct
  source 1..20: mol_type = other RNA
tcagtgactttgggatgtcc

SEQ ID NO: 2869 - RNA, 20 nt, synthetic construct
  source 1..20: mol_type = other RNA
agtgactttgggatgtcccg

SEQ ID NO: 2870 - RNA, 20 nt, synthetic construct
  source 1..20: mol_type = other RNA
atcagtgactttgggatgtc

SEQ ID NO: 2871 - RNA, 20 nt, synthetic construct
  source 1..20: mol_type = other RNA
cagtgactttgggatgtccc

SEQ ID NO: 2872 - RNA, 20 nt, synthetic construct
  source 1..20: mol_type = other RNA
gtgactttgggatgtcccga

SEQ ID NO: 2873 - RNA, 20 nt, synthetic construct
  source 1..20: mol_type = other RNA
gggacctggctgctcggaac

SEQ ID NO: 2874 - RNA, 20 nt, synthetic construct
  source 1..20: mol_type = other RNA
cccagggacctggctgctcg

SEQ ID NO: 2875 - RNA, 20 nt, synthetic construct
  source 1..20: mol_type = other RNA
ccagggacctggctgctcgg

SEQ ID NO: 2876 - RNA, 20 nt, synthetic construct
  source 1..20: mol_type = other RNA
cagggacctggctgctcgga

SEQ ID NO: 2877 - RNA, 20 nt, synthetic construct
  source 1..20: mol_type = other RNA
agggacctggctgctcggaa

SEQ ID NO: 2878 - RNA, 20 nt, synthetic construct
  source 1..20: mol_type = other RNA
gctcggaactgcctggtgac

SEQ ID NO: 2879 - RNA, 20 nt, synthetic construct
  source 1..20: mol_type = other RNA
tcggaactgcctggtgacag

SEQ ID NO: 2880 - RNA, 20 nt, synthetic construct
  source 1..20: mol_type = other RNA
tgctcggaactgcctggtga

SEQ ID NO: 2881 - RNA, 20 nt, synthetic construct
  source 1..20: mol_type = other RNA
ctcggaactgcctggtgaca

SEQ ID NO: 2882 - RNA, 20 nt, synthetic construct
  source 1..20: mol_type = other RNA
cggaactgcctggtgacaga

SEQ ID NO: 2883 - RNA, 20 nt, synthetic construct
  source 1..20: mol_type = other RNA
ggaactgcctggtgacagag

SEQ ID NO: 2884 - RNA, 20 nt, synthetic construct
  source 1..20: mol_type = other RNA
ggcggtgaagtcttgtcgag

SEQ ID NO: 2885 - RNA, 20 nt, synthetic construct
  source 1..20: mol_type = other RNA
ggtgaagtcttgtcgagaga

SEQ ID NO: 2886 - RNA, 20 nt, synthetic construct
  source 1..20: mol_type = other RNA
gcggtgaagtcttgtcgaga

SEQ ID NO: 2887 - RNA, 20 nt, synthetic construct
  source 1..20: mol_type = other RNA
cggtgaagtcttgtcgagag

SEQ ID NO: 2888 - RNA, 20 nt, synthetic construct
  source 1..20: mol_type = other RNA
gtgaagtcttgtcgagagac

SEQ ID NO: 2889 - RNA, 20 nt, synthetic construct
  source 1..20: mol_type = other RNA
tgaagtcttgtcgagagacg

SEQ ID NO: 2890 - RNA, 20 nt, synthetic construct
  source 1..20: mol_type = other RNA
gcagactttggcctcgcacg

SEQ ID NO: 2891 - RNA, 20 nt, synthetic construct
  source 1..20: mol_type = other RNA
agcagactttggcctcgcac

SEQ ID NO: 2892 - RNA, 20 nt, synthetic construct
  source 1..20: mol_type = other RNA
tagcagactttggcctcgca

SEQ ID NO: 2893 - RNA, 20 nt, synthetic construct
  source 1..20: mol_type = other RNA
cagactttggcctcgcacgg

SEQ ID NO: 2894 - RNA, 20 nt, synthetic construct
  source 1..20: mol_type = other RNA
atagcagactttggcctcgc

SEQ ID NO: 2895 - RNA, 20 nt, synthetic construct
  source 1..20: mol_type = other RNA
cgagacctggcagccaggaa

SEQ ID NO: 2896 - RNA, 20 nt, synthetic construct
  source 1..20: mol_type = other RNA
gagacctggcagccaggaat

SEQ ID NO: 2897 - RNA, 20 nt, synthetic construct
  source 1..20: mol_type = other RNA
ccgagacctggcagccagga

SEQ ID NO: 2898 - RNA, 20 nt, synthetic construct
  source 1..20: mol_type = other RNA
accgagacctggcagccagg

SEQ ID NO: 2899 - RNA, 20 nt, synthetic construct
  source 1..20: mol_type = other RNA
caccgagacctggcagccag

SEQ ID NO: 2900 - RNA, 20 nt, synthetic construct
  source 1..20: mol_type = other RNA
aggaatgtcctggtgacaga

SEQ ID NO: 2901 - RNA, 20 nt, synthetic construct
  source 1..20: mol_type = other RNA
caggaatgtcctggtgacag

SEQ ID NO: 2902 - RNA, 20 nt, synthetic construct
  source 1..20: mol_type = other RNA
gccaggaatgtcctggtgac

SEQ ID NO: 2903 - RNA, 20 nt, synthetic construct
  source 1..20: mol_type = other RNA
ggaatgtcctggtgacagag

SEQ ID NO: 2904 - RNA, 20 nt, synthetic construct
  source 1..20: mol_type = other RNA
ccaggaatgtcctggtgaca

SEQ ID NO: 2905 - RNA, 20 nt, synthetic construct
  source 1..20: mol_type = other RNA
agccaggaatgtcctggtga

SEQ ID NO: 2906 - RNA, 20 nt, synthetic construct
  source 1..20: mol_type = other RNA
tgaagatgttgaagtgtaag

SEQ ID NO: 2907 - RNA, 20 nt, synthetic construct
  source 1..20: mol_type = other RNA
tgtgaagatgttgaagtgta

SEQ ID NO: 2908 - RNA, 20 nt, synthetic construct
  source 1..20: mol_type = other RNA
gtgaagatgttgaagtgtaa

SEQ ID NO: 2909 - RNA, 20 nt, synthetic construct
  source 1..20: mol_type = other RNA
ctgtgaagatgttgaagtgt

SEQ ID NO: 2910 - RNA, 20 nt, synthetic construct
  source 1..20: mol_type = other RNA
gctgtgaagatgttgaagtg

SEQ ID NO: 2911 - RNA, 20 nt, synthetic construct
  source 1..20: mol_type = other RNA
ggctgtgaagatgttgaagt

SEQ ID NO: 2912 - RNA, 20 nt, synthetic construct
  source 1..20: mol_type = other RNA
gcagactttggactcgccag

SEQ ID NO: 2913 - RNA, 20 nt, synthetic construct
  source 1..20: mol_type = other RNA
tagcagactttggactcgcc

SEQ ID NO: 2914 - RNA, 20 nt, synthetic construct
  source 1..20: mol_type = other RNA
cagactttggactcgccaga

SEQ ID NO: 2915 - RNA, 20 nt, synthetic construct
  source 1..20: mol_type = other RNA
agcagactttggactcgcca

SEQ ID NO: 2916 - RNA, 20 nt, synthetic construct
  source 1..20: mol_type = other RNA
atagcagactttggactcgc

SEQ ID NO: 2917 - RNA, 20 nt, synthetic construct
  source 1..20: mol_type = other RNA
cgagatttagcagccagaaa

SEQ ID NO: 2918 - RNA, 20 nt, synthetic construct
  source 1..20: mol_type = other RNA
gagatttagcagccagaaat

SEQ ID NO: 2919 - RNA, 20 nt, synthetic construct
  source 1..20: mol_type = other RNA
tcgagatttagcagccagaa

SEQ ID NO: 2920 - RNA, 20 nt, synthetic construct
  source 1..20: mol_type = other RNA
atcgagatttagcagccaga

SEQ ID NO: 2921 - RNA, 20 nt, synthetic construct
  source 1..20: mol_type = other RNA
catcgagatttagcagccag

SEQ ID NO: 2922 - RNA, 20 nt, synthetic construct
  source 1..20: mol_type = other RNA
tgaagatgttgaaaggtgag

SEQ ID NO: 2923 - RNA, 20 nt, synthetic construct
  source 1..20: mol_type = other RNA
cgtgaagatgttgaaaggtg

SEQ ID NO: 2924 - RNA, 20 nt, synthetic construct
  source 1..20: mol_type = other RNA
gccgtgaagatgttgaaagg

SEQ ID NO: 2925 - RNA, 20 nt, synthetic construct
  source 1..20: mol_type = other RNA
gtgaagatgttgaaaggtga

SEQ ID NO: 2926 - RNA, 20 nt, synthetic construct
  source 1..20: mol_type = other RNA
ccgtgaagatgttgaaaggt

SEQ ID NO: 2927 - RNA, 20 nt, synthetic construct
  source 1..20: mol_type = other RNA
ggccgtgaagatgttgaaag

SEQ ID NO: 2928 - RNA, 20 nt, synthetic construct
  source 1..20: mol_type = other RNA
tcgcagacttcgggctggcc

SEQ ID NO: 2929 - RNA, 20 nt, synthetic construct
  source 1..20: mol_type = other RNA
cgcagacttcgggctggccc

SEQ ID NO: 2930 - RNA, 20 nt, synthetic construct
  source 1..20: mol_type = other RNA
gcagacttcgggctggcccg

SEQ ID NO: 2931 - RNA, 20 nt, synthetic construct
  source 1..20: mol_type = other RNA
atcgcagacttcgggctggc

SEQ ID NO: 2932 - RNA, 20 nt, synthetic construct
  source 1..20: mol_type = other RNA
cagacttcgggctggcccgg

SEQ ID NO: 2933 - RNA, 20 nt, synthetic construct
  source 1..20: mol_type = other RNA
agggacctggctgcccgcaa

SEQ ID NO: 2934 - RNA, 20 nt, synthetic construct
  source 1..20: mol_type = other RNA
acagggacctggctgcccgc

SEQ ID NO: 2935 - RNA, 20 nt, synthetic construct
  source 1..20: mol_type = other RNA
cagggacctggctgcccgca

SEQ ID NO: 2936 - RNA, 20 nt, synthetic construct
  source 1..20: mol_type = other RNA
gggacctggctgcccgcaat

SEQ ID NO: 2937 - RNA, 20 nt, synthetic construct
  source 1..20: mol_type = other RNA
cacagggacctggctgcccg

SEQ ID NO: 2938 - RNA, 20 nt, synthetic construct
  source 1..20: mol_type = other RNA
ccgcaatgtgctggtgaccg

SEQ ID NO: 2939 - RNA, 20 nt, synthetic construct
  source 1..20: mol_type = other RNA
cgcaatgtgctggtgaccga

SEQ ID NO: 2940 - RNA, 20 nt, synthetic construct
  source 1..20: mol_type = other RNA
cccgcaatgtgctggtgacc

SEQ ID NO: 2941 - RNA, 20 nt, synthetic construct
  source 1..20: mol_type = other RNA
gcaatgtgctggtgaccgag

SEQ ID NO: 2942 - RNA, 20 nt, synthetic construct
  source 1..20: mol_type = other RNA
gcccgcaatgtgctggtgac

SEQ ID NO: 2943 - RNA, 20 nt, synthetic construct
  source 1..20: mol_type = other RNA
tgcccgcaatgtgctggtga

SEQ ID NO: 2944 - RNA, 20 nt, synthetic construct
  source 1..20: mol_type = other RNA
cgtgaagatgctgaaaggtg

SEQ ID NO: 2945 - RNA, 20 nt, synthetic construct
  source 1..20: mol_type = other RNA
agccgtgaagatgctgaaag

SEQ ID NO: 2946 - RNA, 20 nt, synthetic construct
  source 1..20: mol_type = other RNA
gccgtgaagatgctgaaagg

SEQ ID NO: 2947 - RNA, 20 nt, synthetic construct
  source 1..20: mol_type = other RNA
ccgtgaagatgctgaaaggt

SEQ ID NO: 2948 - RNA, 20 nt, synthetic construct
  source 1..20: mol_type = other RNA
gtgaagatgctgaaaggtga

SEQ ID NO: 2949 - RNA, 20 nt, synthetic construct
  source 1..20: mol_type = other RNA
tgaagatgctgaaaggtgag

SEQ ID NO: 2950 - RNA, 20 nt, synthetic construct
  source 1..20: mol_type = other RNA
ttgctgactttgggctggcc

SEQ ID NO: 2951 - RNA, 20 nt, synthetic construct
  source 1..20: mol_type = other RNA
gctgactttgggctggcccg

SEQ ID NO: 2952 - RNA, 20 nt, synthetic construct
  source 1..20: mol_type = other RNA
ctgactttgggctggcccgc

SEQ ID NO: 2953 - RNA, 20 nt, synthetic construct
  source 1..20: mol_type = other RNA
attgctgactttgggctggc

SEQ ID NO: 2954 - RNA, 20 nt, synthetic construct
  source 1..20: mol_type = other RNA
tgctgactttgggctggccc

SEQ ID NO: 2955 - RNA, 20 nt, synthetic construct
  source 1..20: mol_type = other RNA
cgggacctggctgcccgcaa

SEQ ID NO: 2956 - RNA, 20 nt, synthetic construct
  source 1..20: mol_type = other RNA
caccgggacctggctgcccg

SEQ ID NO: 2957 - RNA, 20 nt, synthetic construct
  source 1..20: mol_type = other RNA
accgggacctggctgcccgc

SEQ ID NO: 2958 - RNA, 20 nt, synthetic construct
  source 1..20: mol_type = other RNA
ccgggacctggctgcccgca

SEQ ID NO: 2959 - RNA, 20 nt, synthetic construct
  source 1..20: mol_type = other RNA
ccgcaatgtgctggtgactg

SEQ ID NO: 2960 - RNA, 20 nt, synthetic construct
  source 1..20: mol_type = other RNA
cgcaatgtgctggtgactga

SEQ ID NO: 2961 - RNA, 20 nt, synthetic construct
  source 1..20: mol_type = other RNA
cccgcaatgtgctggtgact

SEQ ID NO: 2962 - RNA, 20 nt, synthetic construct
  source 1..20: mol_type = other RNA
gcaatgtgctggtgactgag

SEQ ID NO: 2963 - RNA, 20 nt, synthetic construct
  source 1..20: mol_type = other RNA
gccgtcaagatgctcaaagg

SEQ ID NO: 2964 - RNA, 20 nt, synthetic construct
  source 1..20: mol_type = other RNA
cgtcaagatgctcaaaggtg

SEQ ID NO: 2965 - RNA, 20 nt, synthetic construct
  source 1..20: mol_type = other RNA
tcaagatgctcaaaggtgag

SEQ ID NO: 2966 - RNA, 20 nt, synthetic construct
  source 1..20: mol_type = other RNA
ggccgtcaagatgctcaaag

SEQ ID NO: 2967 - RNA, 20 nt, synthetic construct
  source 1..20: mol_type = other RNA
ccgtcaagatgctcaaaggt

SEQ ID NO: 2968 - RNA, 20 nt, synthetic construct
  source 1..20: mol_type = other RNA
gtcaagatgctcaaaggtga

SEQ ID NO: 2969 - RNA, 20 nt, synthetic construct
  source 1..20: mol_type = other RNA
tcgcagactttggcttggcg

SEQ ID NO: 2970 - RNA, 20 nt, synthetic construct
  source 1..20: mol_type = other RNA
cagactttggcttggcgcgt

SEQ ID NO: 2971 - RNA, 20 nt, synthetic construct
  source 1..20: mol_type = other RNA
gcagactttggcttggcgcg

SEQ ID NO: 2972 - RNA, 20 nt, synthetic construct
  source 1..20: mol_type = other RNA
cgcagactttggcttggcgc

SEQ ID NO: 2973 - RNA, 20 nt, synthetic construct
  source 1..20: mol_type = other RNA
atcgcagactttggcttggc

SEQ ID NO: 2974 - RNA, 20 nt, synthetic construct
  source 1..20: mol_type = other RNA
gcgacctgagggcagccaac

SEQ ID NO: 2975 - RNA, 20 nt, synthetic construct
  source 1..20: mol_type = other RNA
cgcgacctgagggcagccaa

SEQ ID NO: 2976 - RNA, 20 nt, synthetic construct
  source 1..20: mol_type = other RNA
ccgcgacctgagggcagcca

SEQ ID NO: 2977 - RNA, 20 nt, synthetic construct
  source 1..20: mol_type = other RNA
accgcgacctgagggcagcc

SEQ ID NO: 2978 - RNA, 20 nt, synthetic construct
  source 1..20: mol_type = other RNA
caccgcgacctgagggcagc

SEQ ID NO: 2979 - RNA, 20 nt, synthetic construct
  source 1..20: mol_type = other RNA
ccaacatcctggttggggag

SEQ ID NO: 2980 - RNA, 20 nt, synthetic construct
  source 1..20: mol_type = other RNA
agccaacatcctggttgggg

SEQ ID NO: 2981 - RNA, 20 nt, synthetic construct
  source 1..20: mol_type = other RNA
gcagccaacatcctggttgg

SEQ ID NO: 2982 - RNA, 20 nt, synthetic construct
  source 1..20: mol_type = other RNA
ggcagccaacatcctggttg

SEQ ID NO: 2983 - RNA, 20 nt, synthetic construct
  source 1..20: mol_type = other RNA
gccaacatcctggttgggga

SEQ ID NO: 2984 - RNA, 20 nt, synthetic construct
  source 1..20: mol_type = other RNA
cagccaacatcctggttggg

SEQ ID NO: 2985 - RNA, 20 nt, synthetic construct
  source 1..20: mol_type = other RNA
cggtgaagacgctgaagccg

SEQ ID NO: 2986 - RNA, 20 nt, synthetic construct
  source 1..20: mol_type = other RNA
gcggtgaagacgctgaagcc

SEQ ID NO: 2987 - RNA, 20 nt, synthetic construct
  source 1..20: mol_type = other RNA
ggcggtgaagacgctgaagc

SEQ ID NO: 2988 - RNA, 20 nt, synthetic construct
  source 1..20: mol_type = other RNA
tgaagacgctgaagccgggc

SEQ ID NO: 2989 - RNA, 20 nt, synthetic construct
  source 1..20: mol_type = other RNA
gtgaagacgctgaagccggg

SEQ ID NO: 2990 - RNA, 20 nt, synthetic construct
  source 1..20: mol_type = other RNA
ggtgaagacgctgaagccgg

SEQ ID NO: 2991 - RNA, 20 nt, synthetic construct
  source 1..20: mol_type = other RNA
gggacctggcagcgagaaac

SEQ ID NO: 2992 - RNA, 20 nt, synthetic construct
  source 1..20: mol_type = other RNA
cgggacctggcagcgagaaa

SEQ ID NO: 2993 - RNA, 20 nt, synthetic construct
  source 1..20: mol_type = other RNA
tcgggacctggcagcgagaa

SEQ ID NO: 2994 - RNA, 20 nt, synthetic construct
  source 1..20: mol_type = other RNA
atcgggacctggcagcgaga

SEQ ID NO: 2995 - RNA, 20 nt, synthetic construct
  source 1..20: mol_type = other RNA
catcgggacctggcagcgag

SEQ ID NO: 2996 - RNA, 20 nt, synthetic construct
  source 1..20: mol_type = other RNA
tgtgaaaatgctgaaaggta

SEQ ID NO: 2997 - RNA, 20 nt, synthetic construct
  source 1..20: mol_type = other RNA
gaaaatgctgaaaggtatgt

SEQ ID NO: 2998 - RNA, 20 nt, synthetic construct
  source 1..20: mol_type = other RNA
tgaaaatgctgaaaggtatg

SEQ ID NO: 2999 - RNA, 20 nt, synthetic construct
  source 1..20: mol_type = other RNA
gtgaaaatgctgaaaggtat

SEQ ID NO: 3000 - RNA, 20 nt, synthetic construct
  source 1..20: mol_type = other RNA
ctgtgaaaatgctgaaaggt

SEQ ID NO: 3001 - RNA, 20 nt, synthetic construct
  source 1..20: mol_type = other RNA
gctgtgaaaatgctgaaagg

SEQ ID NO: 3002 - RNA, 20 nt, synthetic construct
  source 1..20: mol_type = other RNA
ggctgtgaaaatgctgaaag

SEQ ID NO: 3003 - RNA, 20 nt, synthetic construct
  source 1..20: mol_type = other RNA
tgtgactttggattggctcg

SEQ ID NO: 3004 - RNA, 20 nt, synthetic construct
  source 1..20: mol_type = other RNA
tatgtgactttggattggct

SEQ ID NO: 3005 - RNA, 20 nt, synthetic construct
  source 1..20: mol_type = other RNA
gtgactttggattggctcga

SEQ ID NO: 3006 - RNA, 20 nt, synthetic construct
  source 1..20: mol_type = other RNA
atgtgactttggattggctc

SEQ ID NO: 3007 - RNA, 20 nt, synthetic construct
  source 1..20: mol_type = other RNA
atatgtgactttggattggc

SEQ ID NO: 3008 - RNA, 20 nt, synthetic construct
  source 1..20: mol_type = other RNA
agagacctggccgccaggaa

SEQ ID NO: 3009 - RNA, 20 nt, synthetic construct
  source 1..20: mol_type = other RNA
gagacctggccgccaggaac

SEQ ID NO: 3010 - RNA, 20 nt, synthetic construct
  source 1..20: mol_type = other RNA
cagagacctggccgccagga

SEQ ID NO: 3011 - RNA, 20 nt, synthetic construct
  source 1..20: mol_type = other RNA
acagagacctggccgccagg

SEQ ID NO: 3012 - RNA, 20 nt, synthetic construct
  source 1..20: mol_type = other RNA
cacagagacctggccgccag

SEQ ID NO: 3013 - RNA, 20 nt, synthetic construct
  source 1..20: mol_type = other RNA
ggaacgtgcttgtcacccac

SEQ ID NO: 3014 - RNA, 20 nt, synthetic construct
  source 1..20: mol_type = other RNA
aggaacgtgcttgtcaccca

SEQ ID NO: 3015 - RNA, 20 nt, synthetic construct
  source 1..20: mol_type = other RNA
caggaacgtgcttgtcaccc

SEQ ID NO: 3016 - RNA, 20 nt, synthetic construct
  source 1..20: mol_type = other RNA
ccaggaacgtgcttgtcacc

SEQ ID NO: 3017 - RNA, 20 nt, synthetic construct
  source 1..20: mol_type = other RNA
gccaggaacgtgcttgtcac

SEQ ID NO: 3018 - RNA, 20 nt, synthetic construct
  source 1..20: mol_type = other RNA
cgccaggaacgtgcttgtca

SEQ ID NO: 3019 - RNA, 20 nt, synthetic construct
  source 1..20: mol_type = other RNA
gtcaaaatgctgaaaggtac

SEQ ID NO: 3020 - RNA, 20 nt, synthetic construct
  source 1..20: mol_type = other RNA
caaaatgctgaaaggtacag

SEQ ID NO: 3021 - RNA, 20 nt, synthetic construct
  source 1..20: mol_type = other RNA
tcaaaatgctgaaaggtaca

SEQ ID NO: 3022 - RNA, 20 nt, synthetic construct
  source 1..20: mol_type = other RNA
cgtcaaaatgctgaaaggta

SEQ ID NO: 3023 - RNA, 20 nt, synthetic construct
  source 1..20: mol_type = other RNA
ccgtcaaaatgctgaaaggt

SEQ ID NO: 3024 - RNA, 20 nt, synthetic construct
  source 1..20: mol_type = other RNA
gccgtcaaaatgctgaaagg

SEQ ID NO: 3025 - RNA, 20 nt, synthetic construct
  source 1..20: mol_type = other RNA
tgccgtcaaaatgctgaaag

SEQ ID NO: 3026 - RNA, 20 nt, synthetic construct
  source 1..20: mol_type = other RNA
tgtgactttggccttgcccg

SEQ ID NO: 3027 - RNA, 20 nt, synthetic construct
  source 1..20: mol_type = other RNA
ctgtgactttggccttgccc

SEQ ID NO: 3028 - RNA, 20 nt, synthetic construct
  source 1..20: mol_type = other RNA
tctgtgactttggccttgcc

SEQ ID NO: 3029 - RNA, 20 nt, synthetic construct
  source 1..20: mol_type = other RNA
gtgactttggccttgcccgg

SEQ ID NO: 3030 - RNA, 20 nt, synthetic construct
  source 1..20: mol_type = other RNA
atctgtgactttggccttgc

SEQ ID NO: 3031 - RNA, 20 nt, synthetic construct
  source 1..20: mol_type = other RNA
gagacctggctgctcggaac

SEQ ID NO: 3032 - RNA, 20 nt, synthetic construct
  source 1..20: mol_type = other RNA
agagacctggctgctcggaa

SEQ ID NO: 3033 - RNA, 20 nt, synthetic construct
  source 1..20: mol_type = other RNA
cagagacctggctgctcgga

SEQ ID NO: 3034 - RNA, 20 nt, synthetic construct
  source 1..20: mol_type = other RNA
acagagacctggctgctcgg

SEQ ID NO: 3035 - RNA, 20 nt, synthetic construct
  source 1..20: mol_type = other RNA
cacagagacctggctgctcg

SEQ ID NO: 3036 - RNA, 20 nt, synthetic construct
  source 1..20: mol_type = other RNA
ggaacattctgctgtcggaa

SEQ ID NO: 3037 - RNA, 20 nt, synthetic construct
  source 1..20: mol_type = other RNA
gctcggaacattctgctgtc

SEQ ID NO: 3038 - RNA, 20 nt, synthetic construct
  source 1..20: mol_type = other RNA
tgctcggaacattctgctgt

SEQ ID NO: 3039 - RNA, 20 nt, synthetic construct
  source 1..20: mol_type = other RNA
cggaacattctgctgtcgga

SEQ ID NO: 3040 - RNA, 20 nt, synthetic construct
  source 1..20: mol_type = other RNA
tcggaacattctgctgtcgg

SEQ ID NO: 3041 - RNA, 20 nt, synthetic construct
  source 1..20: mol_type = other RNA
ctcggaacattctgctgtcg

SEQ ID NO: 3042 - RNA, 20 nt, synthetic construct
  source 1..20: mol_type = other RNA
gaaaatgctgaaaggtgtgg

SEQ ID NO: 3043 - RNA, 20 nt, synthetic construct
  source 1..20: mol_type = other RNA
tgaaaatgctgaaaggtgtg

SEQ ID NO: 3044 - RNA, 20 nt, synthetic construct
  source 1..20: mol_type = other RNA
gtgaaaatgctgaaaggtgt

SEQ ID NO: 3045 - RNA, 20 nt, synthetic construct
  source 1..20: mol_type = other RNA
cgtgaaaatgctgaaaggtg

SEQ ID NO: 3046 - RNA, 20 nt, synthetic construct
  source 1..20: mol_type = other RNA
gccgtgaaaatgctgaaagg

SEQ ID NO: 3047 - RNA, 20 nt, synthetic construct
  source 1..20: mol_type = other RNA
ccgtgaaaatgctgaaaggt

SEQ ID NO: 3048 - RNA, 20 nt, synthetic construct
  source 1..20: mol_type = other RNA
ggccgtgaaaatgctgaaag

SEQ ID NO: 3049 - RNA, 20 nt, synthetic construct
  source 1..20: mol_type = other RNA
tacgacccggcttccttcta

SEQ ID NO: 3050 - RNA, 20 nt, synthetic construct
  source 1..20: mol_type = other RNA
acgacccggcttccttctat

SEQ ID NO: 3051 - RNA, 20 nt, synthetic construct
  source 1..20: mol_type = other RNA
atttacgacccggcttcctt

SEQ ID NO: 3052 - RNA, 20 nt, synthetic construct
  source 1..20: mol_type = other RNA
tttacgacccggcttccttc

SEQ ID NO: 3053 - RNA, 20 nt, synthetic construct
  source 1..20: mol_type = other RNA
ttacgacccggcttccttct

SEQ ID NO: 3054 - RNA, 20 nt, synthetic construct
  source 1..20: mol_type = other RNA
ggggatctctggtcgggaaa

SEQ ID NO: 3055 - RNA, 20 nt, synthetic construct
  source 1..20: mol_type = other RNA
cacggggatctctggtcggg

SEQ ID NO: 3056 - RNA, 20 nt, synthetic construct
  source 1..20: mol_type = other RNA
acggggatctctggtcggga

SEQ ID NO: 3057 - RNA, 20 nt, synthetic construct
  source 1..20: mol_type = other RNA
cggggatctctggtcgggaa

SEQ ID NO: 3058 - RNA, 20 nt, synthetic construct
  source 1..20: mol_type = other RNA
gggatctctggtcgggaaac

SEQ ID NO: 3059 - RNA, 20 nt, synthetic construct
  source 1..20: mol_type = other RNA
tcgggaaacgtggctgagga

SEQ ID NO: 3060 - RNA, 20 nt, synthetic construct
  source 1..20: mol_type = other RNA
ggaaacgtggctgaggacga

SEQ ID NO: 3061 - RNA, 20 nt, synthetic construct
  source 1..20: mol_type = other RNA
gtcgggaaacgtggctgagg

SEQ ID NO: 3062 - RNA, 20 nt, synthetic construct
  source 1..20: mol_type = other RNA
cgggaaacgtggctgaggac

SEQ ID NO: 3063 - RNA, 20 nt, synthetic construct
  source 1..20: mol_type = other RNA
gggaaacgtggctgaggacg

SEQ ID NO: 3064 - RNA, 20 nt, synthetic construct
  source 1..20: mol_type = other RNA
gaaacgtggctgaggacgac

SEQ ID NO: 3065 - RNA, 20 nt, synthetic construct
  source 1..20: mol_type = other RNA
gttcgtcaaagtcaaccgca

SEQ ID NO: 3066 - RNA, 20 nt, synthetic construct
  source 1..20: mol_type = other RNA
cgtcaaagtcaaccgcagga

SEQ ID NO: 3067 - RNA, 20 nt, synthetic construct
  source 1..20: mol_type = other RNA
caaagtcaaccgcaggacgc

SEQ ID NO: 3068 - RNA, 20 nt, synthetic construct
  source 1..20: mol_type = other RNA
ttcgtcaaagtcaaccgcag

SEQ ID NO: 3069 - RNA, 20 nt, synthetic construct
  source 1..20: mol_type = other RNA
tcgtcaaagtcaaccgcagg

SEQ ID NO: 3070 - RNA, 20 nt, synthetic construct
  source 1..20: mol_type = other RNA
gtcaaagtcaaccgcaggac

SEQ ID NO: 3071 - RNA, 20 nt, synthetic construct
  source 1..20: mol_type = other RNA
tcaaagtcaaccgcaggacg

SEQ ID NO: 3072 - RNA, 20 nt, synthetic construct
  source 1..20: mol_type = other RNA
tttgacccagcttctttcta

SEQ ID NO: 3073 - RNA, 20 nt, synthetic construct
  source 1..20: mol_type = other RNA
ttgacccagcttctttctac

SEQ ID NO: 3074 - RNA, 20 nt, synthetic construct
  source 1..20: mol_type = other RNA
ggggacctctggggtggaaa

SEQ ID NO: 3075 - RNA, 20 nt, synthetic construct
  source 1..20: mol_type = other RNA
cacggggacctctggggtgg

SEQ ID NO: 3076 - RNA, 20 nt, synthetic construct
  source 1..20: mol_type = other RNA
acggggacctctggggtgga

SEQ ID NO: 3077 - RNA, 20 nt, synthetic construct
  source 1..20: mol_type = other RNA
cggggacctctggggtggaa

SEQ ID NO: 3078 - RNA, 20 nt, synthetic construct
  source 1..20: mol_type = other RNA
gggacctctggggtggaaac

SEQ ID NO: 3079 - RNA, 20 nt, synthetic construct
  source 1..20: mol_type = other RNA
gggtggaaacgtagcagagg

SEQ ID NO: 3080 - RNA, 20 nt, synthetic construct
  source 1..20: mol_type = other RNA
ggtggaaacgtagcagagga

SEQ ID NO: 3081 - RNA, 20 nt, synthetic construct
  source 1..20: mol_type = other RNA
gtggaaacgtagcagaggat

SEQ ID NO: 3082 - RNA, 20 nt, synthetic construct
  source 1..20: mol_type = other RNA
tggaaacgtagcagaggatt

SEQ ID NO: 3083 - RNA, 20 nt, synthetic construct
  source 1..20: mol_type = other RNA
ggaaacgtagcagaggattc

SEQ ID NO: 3084 - RNA, 20 nt, synthetic construct
  source 1..20: mol_type = other RNA
gaaacgtagcagaggattcc

SEQ ID NO: 3085 - RNA, 20 nt, synthetic construct
  source 1..20: mol_type = other RNA
gttcgtgaaagtgaacccca

SEQ ID NO: 3086 - RNA, 20 nt, synthetic construct
  source 1..20: mol_type = other RNA
ttcgtgaaagtgaaccccaa

SEQ ID NO: 3087 - RNA, 20 nt, synthetic construct
  source 1..20: mol_type = other RNA
cgtgaaagtgaaccccaagg

SEQ ID NO: 3088 - RNA, 20 nt, synthetic construct
  source 1..20: mol_type = other RNA
gtgaaagtgaaccccaaggc

SEQ ID NO: 3089 - RNA, 20 nt, synthetic construct
  source 1..20: mol_type = other RNA
gaaagtgaaccccaaggcgg

SEQ ID NO: 3090 - RNA, 20 nt, synthetic construct
  source 1..20: mol_type = other RNA
tcgtgaaagtgaaccccaag

SEQ ID NO: 3091 - RNA, 20 nt, synthetic construct
  source 1..20: mol_type = other RNA
tgaaagtgaaccccaaggcg

SEQ ID NO: 3092 - RNA, 20 nt, synthetic construct
  source 1..20: mol_type = other RNA
agagatctggctgccagaaa

SEQ ID NO: 3093 - RNA, 20 nt, synthetic construct
  source 1..20: mol_type = other RNA
gagatctggctgccagaaat

SEQ ID NO: 3094 - RNA, 20 nt, synthetic construct
  source 1..20: mol_type = other RNA
cagagatctggctgccagaa

SEQ ID NO: 3095 - RNA, 20 nt, synthetic construct
  source 1..20: mol_type = other RNA
acagagatctggctgccaga

SEQ ID NO: 3096 - RNA, 20 nt, synthetic construct
  source 1..20: mol_type = other RNA
cacagagatctggctgccag

SEQ ID NO: 3097 - RNA, 20 nt, synthetic construct
  source 1..20: mol_type = other RNA
gccagaaatgtcctcgttgg

SEQ ID NO: 3098 - RNA, 20 nt, synthetic construct
  source 1..20: mol_type = other RNA
gaaatgtcctcgttggtgaa

SEQ ID NO: 3099 - RNA, 20 nt, synthetic construct
  source 1..20: mol_type = other RNA
agaaatgtcctcgttggtga

SEQ ID NO: 3100 - RNA, 20 nt, synthetic construct
  source 1..20: mol_type = other RNA
cagaaatgtcctcgttggtg

SEQ ID NO: 3101 - RNA, 20 nt, synthetic construct
  source 1..20: mol_type = other RNA
ccagaaatgtcctcgttggt

SEQ ID NO: 3102 - RNA, 20 nt, synthetic construct
  source 1..20: mol_type = other RNA
tgccagaaatgtcctcgttg

SEQ ID NO: 3103 - RNA, 20 nt, synthetic construct
  source 1..20: mol_type = other RNA
gaaaacattaaaaccaggtg

SEQ ID NO: 3104 - RNA, 20 nt, synthetic construct
  source 1..20: mol_type = other RNA
gtgaaaacattaaaaccagg

SEQ ID NO: 3105 - RNA, 20 nt, synthetic construct
  source 1..20: mol_type = other RNA
cagtgaaaacattaaaacca

SEQ ID NO: 3106 - RNA, 20 nt, synthetic construct
  source 1..20: mol_type = other RNA
gcagtgaaaacattaaaacc

SEQ ID NO: 3107 - RNA, 20 nt, synthetic construct
  source 1..20: mol_type = other RNA
tgaaaacattaaaaccaggt

SEQ ID NO: 3108 - RNA, 20 nt, synthetic construct
  source 1..20: mol_type = other RNA
agtgaaaacattaaaaccag

SEQ ID NO: 3109 - RNA, 20 nt, synthetic construct
  source 1..20: mol_type = other RNA
agcagtgaaaacattaaaac

SEQ ID NO: 3110 - RNA, 20 nt, synthetic construct
  source 1..20: mol_type = other RNA
ttgctgacttcggattggcc

SEQ ID NO: 3111 - RNA, 20 nt, synthetic construct
  source 1..20: mol_type = other RNA
ctgacttcggattggcccga

SEQ ID NO: 3112 - RNA, 20 nt, synthetic construct
  source 1..20: mol_type = other RNA
gctgacttcggattggcccg

SEQ ID NO: 3113 - RNA, 20 nt, synthetic construct
  source 1..20: mol_type = other RNA
tgctgacttcggattggccc

SEQ ID NO: 3114 - RNA, 20 nt, synthetic construct
  source 1..20: mol_type = other RNA
attgctgacttcggattggc

SEQ ID NO: 3115 - RNA, 20 nt, synthetic construct
  source 1..20: mol_type = other RNA
gagatctgcgatcagcaaac

SEQ ID NO: 3116 - RNA, 20 nt, synthetic construct
  source 1..20: mol_type = other RNA
agagatctgcgatcagcaaa

SEQ ID NO: 3117 - RNA, 20 nt, synthetic construct
  source 1..20: mol_type = other RNA
tagagatctgcgatcagcaa

SEQ ID NO: 3118 - RNA, 20 nt, synthetic construct
  source 1..20: mol_type = other RNA
atagagatctgcgatcagca

SEQ ID NO: 3119 - RNA, 20 nt, synthetic construct
  source 1..20: mol_type = other RNA
catagagatctgcgatcagc

SEQ ID NO: 3120 - RNA, 20 nt, synthetic construct
  source 1..20: mol_type = other RNA
caaacattctagtggggaat

SEQ ID NO: 3121 - RNA, 20 nt, synthetic construct
  source 1..20: mol_type = other RNA
gcaaacattctagtggggaa

SEQ ID NO: 3122 - RNA, 20 nt, synthetic construct
  source 1..20: mol_type = other RNA
atcagcaaacattctagtgg

SEQ ID NO: 3123 - RNA, 20 nt, synthetic construct
  source 1..20: mol_type = other RNA
agcaaacattctagtgggga

SEQ ID NO: 3124 - RNA, 20 nt, synthetic construct
  source 1..20: mol_type = other RNA
cagcaaacattctagtgggg

SEQ ID NO: 3125 - RNA, 20 nt, synthetic construct
  source 1..20: mol_type = other RNA
tcagcaaacattctagtggg

SEQ ID NO: 3126 - RNA, 20 nt, synthetic construct
  source 1..20: mol_type = other RNA
ccataaagactcttaaacca

SEQ ID NO: 3127 - RNA, 20 nt, synthetic construct
  source 1..20: mol_type = other RNA
gccataaagactcttaaacc

SEQ ID NO: 3128 - RNA, 20 nt, synthetic construct
  source 1..20: mol_type = other RNA
taaagactcttaaaccaggc

SEQ ID NO: 3129 - RNA, 20 nt, synthetic construct
  source 1..20: mol_type = other RNA
ataaagactcttaaaccagg

SEQ ID NO: 3130 - RNA, 20 nt, synthetic construct
  source 1..20: mol_type = other RNA
cataaagactcttaaaccag

SEQ ID NO: 3131 - RNA, 20 nt, synthetic construct
  source 1..20: mol_type = other RNA
agccataaagactcttaaac

SEQ ID NO: 3132 - RNA, 20 nt, synthetic construct
  source 1..20: mol_type = other RNA
gtgtgactttggcagtgcca

SEQ ID NO: 3133 - RNA, 20 nt, synthetic construct
  source 1..20: mol_type = other RNA
gtgactttggcagtgccacg

SEQ ID NO: 3134 - RNA, 20 nt, synthetic construct
  source 1..20: mol_type = other RNA
tgtgtgactttggcagtgcc

SEQ ID NO: 3135 - RNA, 20 nt, synthetic construct
  source 1..20: mol_type = other RNA
ctgtgtgactttggcagtgc

SEQ ID NO: 3136 - RNA, 20 nt, synthetic construct
  source 1..20: mol_type = other RNA
cacagggacctcaaggtagt

SEQ ID NO: 3137 - RNA, 20 nt, synthetic construct
  source 1..20: mol_type = other RNA
gggacctcaaggtagtggct

SEQ ID NO: 3138 - RNA, 20 nt, synthetic construct
  source 1..20: mol_type = other RNA
agggacctcaaggtagtggc

SEQ ID NO: 3139 - RNA, 20 nt, synthetic construct
  source 1..20: mol_type = other RNA
cagggacctcaaggtagtgg

SEQ ID NO: 3140 - RNA, 20 nt, synthetic construct
  source 1..20: mol_type = other RNA
acagggacctcaaggtagtg

SEQ ID NO: 3141 - RNA, 20 nt, synthetic construct
  source 1..20: mol_type = other RNA
agaacttgttgcttagtaac

SEQ ID NO: 3142 - RNA, 20 nt, synthetic construct
  source 1..20: mol_type = other RNA
gagaacttgttgcttagtaa

SEQ ID NO: 3143 - RNA, 20 nt, synthetic construct
  source 1..20: mol_type = other RNA
tgagaacttgttgcttagta

SEQ ID NO: 3144 - RNA, 20 nt, synthetic construct
  source 1..20: mol_type = other RNA
ttgagaacttgttgcttagt

SEQ ID NO: 3145 - RNA, 20 nt, synthetic construct
  source 1..20: mol_type = other RNA
gttgagaacttgttgcttag

SEQ ID NO: 3146 - RNA, 20 nt, synthetic construct
  source 1..20: mol_type = other RNA
ggttgagaacttgttgctta

SEQ ID NO: 3147 - RNA, 20 nt, synthetic construct
  source 1..20: mol_type = other RNA
taaaggtaatgaaccattta

SEQ ID NO: 3148 - RNA, 20 nt, synthetic construct
  source 1..20: mol_type = other RNA
ttaaaggtaatgaaccattt

SEQ ID NO: 3149 - RNA, 20 nt, synthetic construct
  source 1..20: mol_type = other RNA
attaaaggtaatgaaccatt

SEQ ID NO: 3150 - RNA, 20 nt, synthetic construct
  source 1..20: mol_type = other RNA
cattaaaggtaatgaaccat

SEQ ID NO: 3151 - RNA, 20 nt, synthetic construct
  source 1..20: mol_type = other RNA
gcattaaaggtaatgaacca

SEQ ID NO: 3152 - RNA, 20 nt, synthetic construct
  source 1..20: mol_type = other RNA
tgcattaaaggtaatgaacc

SEQ ID NO: 3153 - RNA, 20 nt, synthetic construct
  source 1..20: mol_type = other RNA
atctctgaccttgggctggc

SEQ ID NO: 3154 - RNA, 20 nt, synthetic construct
  source 1..20: mol_type = other RNA
ctctgaccttgggctggccg

SEQ ID NO: 3155 - RNA, 20 nt, synthetic construct
  source 1..20: mol_type = other RNA
tctgaccttgggctggccgt

SEQ ID NO: 3156 - RNA, 20 nt, synthetic construct
  source 1..20: mol_type = other RNA
tctctgaccttgggctggcc

SEQ ID NO: 3157 - RNA, 20 nt, synthetic construct
  source 1..20: mol_type = other RNA
ctgaccttgggctggccgtg

SEQ ID NO: 3158 - RNA, 20 nt, synthetic construct
  source 1..20: mol_type = other RNA
cgcgacctcaagcccgagaa

SEQ ID NO: 3159 - RNA, 20 nt, synthetic construct
  source 1..20: mol_type = other RNA
taccgcgacctcaagcccga

SEQ ID NO: 3160 - RNA, 20 nt, synthetic construct
  source 1..20: mol_type = other RNA
accgcgacctcaagcccgag

SEQ ID NO: 3161 - RNA, 20 nt, synthetic construct
  source 1..20: mol_type = other RNA
ccgcgacctcaagcccgaga

SEQ ID NO: 3162 - RNA, 20 nt, synthetic construct
  source 1..20: mol_type = other RNA
gcgacctcaagcccgagaac

SEQ ID NO: 3163 - RNA, 20 nt, synthetic construct
  source 1..20: mol_type = other RNA
gagaacgtgctgctggacaa

SEQ ID NO: 3164 - RNA, 20 nt, synthetic construct
  source 1..20: mol_type = other RNA
gcccgagaacgtgctgctgg

SEQ ID NO: 3165 - RNA, 20 nt, synthetic construct
  source 1..20: mol_type = other RNA
cccgagaacgtgctgctgga

SEQ ID NO: 3166 - RNA, 20 nt, synthetic construct
  source 1..20: mol_type = other RNA
ccgagaacgtgctgctggac

SEQ ID NO: 3167 - RNA, 20 nt, synthetic construct
  source 1..20: mol_type = other RNA
cgagaacgtgctgctggaca

SEQ ID NO: 3168 - RNA, 20 nt, synthetic construct
  source 1..20: mol_type = other RNA
agaacgtgctgctggacaat

SEQ ID NO: 3169 - RNA, 20 nt, synthetic construct
  source 1..20: mol_type = other RNA
tgcctgcaagaagctgaaca

SEQ ID NO: 3170 - RNA, 20 nt, synthetic construct
  source 1..20: mol_type = other RNA
ctgcaagaagctgaacaaga

SEQ ID NO: 3171 - RNA, 20 nt, synthetic construct
  source 1..20: mol_type = other RNA
gcaagaagctgaacaagaag

SEQ ID NO: 3172 - RNA, 20 nt, synthetic construct
  source 1..20: mol_type = other RNA
gcctgcaagaagctgaacaa

SEQ ID NO: 3173 - RNA, 20 nt, synthetic construct
  source 1..20: mol_type = other RNA
cctgcaagaagctgaacaag

SEQ ID NO: 3174 - RNA, 20 nt, synthetic construct
  source 1..20: mol_type = other RNA
tgcaagaagctgaacaagaa

SEQ ID NO: 3175 - RNA, 20 nt, synthetic construct
  source 1..20: mol_type = other RNA
tctcggacctgggcctggcc

SEQ ID NO: 3176 - RNA, 20 nt, synthetic construct
  source 1..20: mol_type = other RNA
tcggacctgggcctggcctg

SEQ ID NO: 3177 - RNA, 20 nt, synthetic construct
  source 1..20: mol_type = other RNA
atctcggacctgggcctggc

SEQ ID NO: 3178 - RNA, 20 nt, synthetic construct
  source 1..20: mol_type = other RNA
ctcggacctgggcctggcct

SEQ ID NO: 3179 - RNA, 20 nt, synthetic construct
  source 1..20: mol_type = other RNA
cggacctgggcctggcctgt

SEQ ID NO: 3180 - RNA, 20 nt, synthetic construct
  source 1..20: mol_type = other RNA
taccgggacctgaaggtgag

SEQ ID NO: 3181 - RNA, 20 nt, synthetic construct
  source 1..20: mol_type = other RNA
ccgggacctgaaggtgagcg

SEQ ID NO: 3182 - RNA, 20 nt, synthetic construct
  source 1..20: mol_type = other RNA
cgggacctgaaggtgagcgc

SEQ ID NO: 3183 - RNA, 20 nt, synthetic construct
  source 1..20: mol_type = other RNA
gggacctgaaggtgagcgcc

SEQ ID NO: 3184 - RNA, 20 nt, synthetic construct
  source 1..20: mol_type = other RNA
ccagccaacatccttctgga

SEQ ID NO: 3185 - RNA, 20 nt, synthetic construct
  source 1..20: mol_type = other RNA
agccaacatccttctggacg

SEQ ID NO: 3186 - RNA, 20 nt, synthetic construct
  source 1..20: mol_type = other RNA
gccagccaacatccttctgg

SEQ ID NO: 3187 - RNA, 20 nt, synthetic construct
  source 1..20: mol_type = other RNA
cagccaacatccttctggac

SEQ ID NO: 3188 - RNA, 20 nt, synthetic construct
  source 1..20: mol_type = other RNA
gccaacatccttctggacga

SEQ ID NO: 3189 - RNA, 20 nt, synthetic construct
  source 1..20: mol_type = other RNA
ccaacatccttctggacgag

SEQ ID NO: 3190 - RNA, 20 nt, synthetic construct
  source 1..20: mol_type = other RNA
catgaagtgcctggacaaaa

SEQ ID NO: 3191 - RNA, 20 nt, synthetic construct
  source 1..20: mol_type = other RNA
cgccatgaagtgcctggaca

SEQ ID NO: 3192 - RNA, 20 nt, synthetic construct
  source 1..20: mol_type = other RNA
gccatgaagtgcctggacaa

SEQ ID NO: 3193 - RNA, 20 nt, synthetic construct
  source 1..20: mol_type = other RNA
ccatgaagtgcctggacaaa

SEQ ID NO: 3194 - RNA, 20 nt, synthetic construct
  source 1..20: mol_type = other RNA
tatcagatcttggtcttgcc

SEQ ID NO: 3195 - RNA, 20 nt, synthetic construct
  source 1..20: mol_type = other RNA
tcagatcttggtcttgcctg

SEQ ID NO: 3196 - RNA, 20 nt, synthetic construct
  source 1..20: mol_type = other RNA
atatcagatcttggtcttgc

SEQ ID NO: 3197 - RNA, 20 nt, synthetic construct
  source 1..20: mol_type = other RNA
atcagatcttggtcttgcct

SEQ ID NO: 3198 - RNA, 20 nt, synthetic construct
  source 1..20: mol_type = other RNA
cagatcttggtcttgcctgc

SEQ ID NO: 3199 - RNA, 20 nt, synthetic construct
  source 1..20: mol_type = other RNA
cagagatttgaaggtgagga

SEQ ID NO: 3200 - RNA, 20 nt, synthetic construct
  source 1..20: mol_type = other RNA
tacagagatttgaaggtgag

SEQ ID NO: 3201 - RNA, 20 nt, synthetic construct
  source 1..20: mol_type = other RNA
acagagatttgaaggtgagg

SEQ ID NO: 3202 - RNA, 20 nt, synthetic construct
  source 1..20: mol_type = other RNA
agagatttgaaggtgaggac

SEQ ID NO: 3203 - RNA, 20 nt, synthetic construct
  source 1..20: mol_type = other RNA
gagatttgaaggtgaggacg

SEQ ID NO: 3204 - RNA, 20 nt, synthetic construct
  source 1..20: mol_type = other RNA
ccagcaaatattctcttgga

SEQ ID NO: 3205 - RNA, 20 nt, synthetic construct
  source 1..20: mol_type = other RNA
gccagcaaatattctcttgg

SEQ ID NO: 3206 - RNA, 20 nt, synthetic construct
  source 1..20: mol_type = other RNA
cagcaaatattctcttggat

SEQ ID NO: 3207 - RNA, 20 nt, synthetic construct
  source 1..20: mol_type = other RNA
agcaaatattctcttggatg

SEQ ID NO: 3208 - RNA, 20 nt, synthetic construct
  source 1..20: mol_type = other RNA
gcaaatattctcttggatga

SEQ ID NO: 3209 - RNA, 20 nt, synthetic construct
  source 1..20: mol_type = other RNA
caaatattctcttggatgaa

SEQ ID NO: 3210 - RNA, 20 nt, synthetic construct
  source 1..20: mol_type = other RNA
tgcaatgaaatgcttagata

SEQ ID NO: 3211 - RNA, 20 nt, synthetic construct
  source 1..20: mol_type = other RNA
aatgaaatgcttagataaga

SEQ ID NO: 3212 - RNA, 20 nt, synthetic construct
  source 1..20: mol_type = other RNA
tgaaatgcttagataagaag

SEQ ID NO: 3213 - RNA, 20 nt, synthetic construct
  source 1..20: mol_type = other RNA
gaaatgcttagataagaaga

SEQ ID NO: 3214 - RNA, 20 nt, synthetic construct
  source 1..20: mol_type = other RNA
gcaatgaaatgcttagataa

SEQ ID NO: 3215 - RNA, 20 nt, synthetic construct
  source 1..20: mol_type = other RNA
caatgaaatgcttagataag

SEQ ID NO: 3216 - RNA, 20 nt, synthetic construct
  source 1..20: mol_type = other RNA
atgaaatgcttagataagaa

SEQ ID NO: 3217 - RNA, 20 nt, synthetic construct
  source 1..20: mol_type = other RNA
tcagacctcggtttggccac

SEQ ID NO: 3218 - RNA, 20 nt, synthetic construct
  source 1..20: mol_type = other RNA
atttcagacctcggtttggc

SEQ ID NO: 3219 - RNA, 20 nt, synthetic construct
  source 1..20: mol_type = other RNA
tttcagacctcggtttggcc

SEQ ID NO: 3220 - RNA, 20 nt, synthetic construct
  source 1..20: mol_type = other RNA
ttcagacctcggtttggcca

SEQ ID NO: 3221 - RNA, 20 nt, synthetic construct
  source 1..20: mol_type = other RNA
cagacctcggtttggccaca

SEQ ID NO: 3222 - RNA, 20 nt, synthetic construct
  source 1..20: mol_type = other RNA
tgtagagacttgaagcctga

SEQ ID NO: 3223 - RNA, 20 nt, synthetic construct
  source 1..20: mol_type = other RNA
gtagagacttgaagcctgag

SEQ ID NO: 3224 - RNA, 20 nt, synthetic construct
  source 1..20: mol_type = other RNA
tagagacttgaagcctgaga

SEQ ID NO: 3225 - RNA, 20 nt, synthetic construct
  source 1..20: mol_type = other RNA
agagacttgaagcctgagaa

SEQ ID NO: 3226 - RNA, 20 nt, synthetic construct
  source 1..20: mol_type = other RNA
gagacttgaagcctgagaat

SEQ ID NO: 3227 - RNA, 20 nt, synthetic construct
  source 1..20: mol_type = other RNA
cctgagaatattctccttga

SEQ ID NO: 3228 - RNA, 20 nt, synthetic construct
  source 1..20: mol_type = other RNA
agaatattctccttgatgat

SEQ ID NO: 3229 - RNA, 20 nt, synthetic construct
  source 1..20: mol_type = other RNA
gcctgagaatattctccttg

SEQ ID NO: 3230 - RNA, 20 nt, synthetic construct
  source 1..20: mol_type = other RNA
ctgagaatattctccttgat

SEQ ID NO: 3231 - RNA, 20 nt, synthetic construct
  source 1..20: mol_type = other RNA
tgagaatattctccttgatg

SEQ ID NO: 3232 - RNA, 20 nt, synthetic construct
  source 1..20: mol_type = other RNA
gagaatattctccttgatga

SEQ ID NO: 3233 - RNA, 20 nt, synthetic construct
  source 1..20: mol_type = other RNA
atctcagacctgggcttggc

SEQ ID NO: 3234 - RNA, 20 nt, synthetic construct
  source 1..20: mol_type = other RNA
ctcagacctgggcttggctg

SEQ ID NO: 3235 - RNA, 20 nt, synthetic construct
  source 1..20: mol_type = other RNA
tctcagacctgggcttggct

SEQ ID NO: 3236 - RNA, 20 nt, synthetic construct
  source 1..20: mol_type = other RNA
tcagacctgggcttggctgt

SEQ ID NO: 3237 - RNA, 20 nt, synthetic construct
  source 1..20: mol_type = other RNA
cagacctgggcttggctgtg

SEQ ID NO: 3238 - RNA, 20 nt, synthetic construct
  source 1..20: mol_type = other RNA
ttcagagatctgaaacctga

SEQ ID NO: 3239 - RNA, 20 nt, synthetic construct
  source 1..20: mol_type = other RNA
tcagagatctgaaacctgaa

SEQ ID NO: 3240 - RNA, 20 nt, synthetic construct
  source 1..20: mol_type = other RNA
cagagatctgaaacctgaaa

SEQ ID NO: 3241 - RNA, 20 nt, synthetic construct
  source 1..20: mol_type = other RNA
agagatctgaaacctgaaaa

SEQ ID NO: 3242 - RNA, 20 nt, synthetic construct
  source 1..20: mol_type = other RNA
gagatctgaaacctgaaaac

SEQ ID NO: 3243 - RNA, 20 nt, synthetic construct
  source 1..20: mol_type = other RNA
cctgaaaacatcctgttaga

SEQ ID NO: 3244 - RNA, 20 nt, synthetic construct
  source 1..20: mol_type = other RNA
acctgaaaacatcctgttag

SEQ ID NO: 3245 - RNA, 20 nt, synthetic construct
  source 1..20: mol_type = other RNA
ctgaaaacatcctgttagat

SEQ ID NO: 3246 - RNA, 20 nt, synthetic construct
  source 1..20: mol_type = other RNA
tgaaaacatcctgttagatg

SEQ ID NO: 3247 - RNA, 20 nt, synthetic construct
  source 1..20: mol_type = other RNA
gaaaacatcctgttagatga

SEQ ID NO: 3248 - RNA, 20 nt, synthetic construct
  source 1..20: mol_type = other RNA
aaaacatcctgttagatgat

SEQ ID NO: 3249 - RNA, 20 nt, synthetic construct
  source 1..20: mol_type = other RNA
tgcctgcaagcgcttggaga

SEQ ID NO: 3250 - RNA, 20 nt, synthetic construct
  source 1..20: mol_type = other RNA
ctgcaagcgcttggagaaga

SEQ ID NO: 3251 - RNA, 20 nt, synthetic construct
  source 1..20: mol_type = other RNA
gcaagcgcttggagaagaag

SEQ ID NO: 3252 - RNA, 20 nt, synthetic construct
  source 1..20: mol_type = other RNA
gcctgcaagcgcttggagaa

SEQ ID NO: 3253 - RNA, 20 nt, synthetic construct
  source 1..20: mol_type = other RNA
cctgcaagcgcttggagaag

SEQ ID NO: 3254 - RNA, 20 nt, synthetic construct
  source 1..20: mol_type = other RNA
tgcaagcgcttggagaagaa

SEQ ID NO: 3255 - RNA, 20 nt, synthetic construct
  source 1..20: mol_type = other RNA
atctctgacctgggactagc

SEQ ID NO: 3256 - RNA, 20 nt, synthetic construct
  source 1..20: mol_type = other RNA
ctctgacctgggactagctg

SEQ ID NO: 3257 - RNA, 20 nt, synthetic construct
  source 1..20: mol_type = other RNA
tctctgacctgggactagct

SEQ ID NO: 3258 - RNA, 20 nt, synthetic construct
  source 1..20: mol_type = other RNA
tctgacctgggactagctgt

SEQ ID NO: 3259 - RNA, 20 nt, synthetic construct
  source 1..20: mol_type = other RNA
ctgacctgggactagctgtg

SEQ ID NO: 3260 - RNA, 20 nt, synthetic construct
  source 1..20: mol_type = other RNA
cacagggacctgaagcccga

SEQ ID NO: 3261 - RNA, 20 nt, synthetic construct
  source 1..20: mol_type = other RNA
acagggacctgaagcccgag

SEQ ID NO: 3262 - RNA, 20 nt, synthetic construct
  source 1..20: mol_type = other RNA
cagggacctgaagcccgaga

SEQ ID NO: 3263 - RNA, 20 nt, synthetic construct
  source 1..20: mol_type = other RNA
agggacctgaagcccgagaa

SEQ ID NO: 3264 - RNA, 20 nt, synthetic construct
  source 1..20: mol_type = other RNA
cccgagaacatcttgctgga

SEQ ID NO: 3265 - RNA, 20 nt, synthetic construct
  source 1..20: mol_type = other RNA
gcccgagaacatcttgctgg

SEQ ID NO: 3266 - RNA, 20 nt, synthetic construct
  source 1..20: mol_type = other RNA
ccgagaacatcttgctggat

SEQ ID NO: 3267 - RNA, 20 nt, synthetic construct
  source 1..20: mol_type = other RNA
cgagaacatcttgctggatg

SEQ ID NO: 3268 - RNA, 20 nt, synthetic construct
  source 1..20: mol_type = other RNA
gagaacatcttgctggatga

SEQ ID NO: 3269 - RNA, 20 nt, synthetic construct
  source 1..20: mol_type = other RNA
agaacatcttgctggatgac

SEQ ID NO: 3270 - RNA, 20 nt, synthetic construct
  source 1..20: mol_type = other RNA
ctgcaagaagctagagaaaa

SEQ ID NO: 3271 - RNA, 20 nt, synthetic construct
  source 1..20: mol_type = other RNA
tgcctgcaagaagctagaga

SEQ ID NO: 3272 - RNA, 20 nt, synthetic construct
  source 1..20: mol_type = other RNA
gcctgcaagaagctagagaa

SEQ ID NO: 3273 - RNA, 20 nt, synthetic construct
  source 1..20: mol_type = other RNA
cctgcaagaagctagagaaa

SEQ ID NO: 3274 - RNA, 20 nt, synthetic construct
  source 1..20: mol_type = other RNA
ttatctgacctggggctggc

SEQ ID NO: 3275 - RNA, 20 nt, synthetic construct
  source 1..20: mol_type = other RNA
atctgacctggggctggccg

SEQ ID NO: 3276 - RNA, 20 nt, synthetic construct
  source 1..20: mol_type = other RNA
tctgacctggggctggccgt

SEQ ID NO: 3277 - RNA, 20 nt, synthetic construct
  source 1..20: mol_type = other RNA
tatctgacctggggctggcc

SEQ ID NO: 3278 - RNA, 20 nt, synthetic construct
  source 1..20: mol_type = other RNA
ctgacctggggctggccgtg

SEQ ID NO: 3279 - RNA, 20 nt, synthetic construct
  source 1..20: mol_type = other RNA
cgggacatgaagcctgagaa

SEQ ID NO: 3280 - RNA, 20 nt, synthetic construct
  source 1..20: mol_type = other RNA
tatcgggacatgaagcctga

SEQ ID NO: 3281 - RNA, 20 nt, synthetic construct
  source 1..20: mol_type = other RNA
atcgggacatgaagcctgag

SEQ ID NO: 3282 - RNA, 20 nt, synthetic construct
  source 1..20: mol_type = other RNA
tcgggacatgaagcctgaga

SEQ ID NO: 3283 - RNA, 20 nt, synthetic construct
  source 1..20: mol_type = other RNA
gggacatgaagcctgagaat

SEQ ID NO: 3284 - RNA, 20 nt, synthetic construct
  source 1..20: mol_type = other RNA
cctgagaatgtgcttctgga

SEQ ID NO: 3285 - RNA, 20 nt, synthetic construct
  source 1..20: mol_type = other RNA
gcctgagaatgtgcttctgg

SEQ ID NO: 3286 - RNA, 20 nt, synthetic construct
  source 1..20: mol_type = other RNA
ctgagaatgtgcttctggat

SEQ ID NO: 3287 - RNA, 20 nt, synthetic construct
  source 1..20: mol_type = other RNA
tgagaatgtgcttctggatg

SEQ ID NO: 3288 - RNA, 20 nt, synthetic construct
  source 1..20: mol_type = other RNA
gagaatgtgcttctggatga

SEQ ID NO: 3289 - RNA, 20 nt, synthetic construct
  source 1..20: mol_type = other RNA
agaatgtgcttctggatgac

SEQ ID NO: 3290 - RNA, 20 nt, synthetic construct
  source 1..20: mol_type = other RNA
tgcctgtaagaaactggaca

SEQ ID NO: 3291 - RNA, 20 nt, synthetic construct
  source 1..20: mol_type = other RNA
ctgtaagaaactggacaaga

SEQ ID NO: 3292 - RNA, 20 nt, synthetic construct
  source 1..20: mol_type = other RNA
gtaagaaactggacaagaag

SEQ ID NO: 3293 - RNA, 20 nt, synthetic construct
  source 1..20: mol_type = other RNA
gcctgtaagaaactggacaa

SEQ ID NO: 3294 - RNA, 20 nt, synthetic construct
  source 1..20: mol_type = other RNA
cctgtaagaaactggacaag

SEQ ID NO: 3295 - RNA, 20 nt, synthetic construct
  source 1..20: mol_type = other RNA
tgtaagaaactggacaagaa

SEQ ID NO: 3296 - RNA, 20 nt, synthetic construct
  source 1..20: mol_type = other RNA
gcgacatcaagccccagaac

SEQ ID NO: 3297 - RNA, 20 nt, synthetic construct
  source 1..20: mol_type = other RNA
cgcgacatcaagccccagaa

SEQ ID NO: 3298 - RNA, 20 nt, synthetic construct
  source 1..20: mol_type = other RNA
ccgcgacatcaagccccaga

SEQ ID NO: 3299 - RNA, 20 nt, synthetic construct
  source 1..20: mol_type = other RNA
accgcgacatcaagccccag

SEQ ID NO: 3300 - RNA, 20 nt, synthetic construct
  source 1..20: mol_type = other RNA
caccgcgacatcaagcccca

SEQ ID NO: 3301 - RNA, 20 nt, synthetic construct
  source 1..20: mol_type = other RNA
cagaacctgctggtggaccc

SEQ ID NO: 3302 - RNA, 20 nt, synthetic construct
  source 1..20: mol_type = other RNA
agaacctgctggtggaccct

SEQ ID NO: 3303 - RNA, 20 nt, synthetic construct
  source 1..20: mol_type = other RNA
ccagaacctgctggtggacc

SEQ ID NO: 3304 - RNA, 20 nt, synthetic construct
  source 1..20: mol_type = other RNA
cccagaacctgctggtggac

SEQ ID NO: 3305 - RNA, 20 nt, synthetic construct
  source 1..20: mol_type = other RNA
ccccagaacctgctggtgga

SEQ ID NO: 3306 - RNA, 20 nt, synthetic construct
  source 1..20: mol_type = other RNA
gccccagaacctgctggtgg

SEQ ID NO: 3307 - RNA, 20 nt, synthetic construct
  source 1..20: mol_type = other RNA
gccatcaagaaggttctcca

SEQ ID NO: 3308 - RNA, 20 nt, synthetic construct
  source 1..20: mol_type = other RNA
cgccatcaagaaggttctcc

SEQ ID NO: 3309 - RNA, 20 nt, synthetic construct
  source 1..20: mol_type = other RNA
tcaagaaggttctccaggac

SEQ ID NO: 3310 - RNA, 20 nt, synthetic construct
  source 1..20: mol_type = other RNA
atcaagaaggttctccagga

SEQ ID NO: 3311 - RNA, 20 nt, synthetic construct
  source 1..20: mol_type = other RNA
catcaagaaggttctccagg

SEQ ID NO: 3312 - RNA, 20 nt, synthetic construct
  source 1..20: mol_type = other RNA
ccatcaagaaggttctccag

SEQ ID NO: 3313 - RNA, 20 nt, synthetic construct
  source 1..20: mol_type = other RNA
ctctgtgactttggaaggta

SEQ ID NO: 3314 - RNA, 20 nt, synthetic construct
  source 1..20: mol_type = other RNA
gtgactttggaaggtaagct

SEQ ID NO: 3315 - RNA, 20 nt, synthetic construct
  source 1..20: mol_type = other RNA
tgtgactttggaaggtaagc

SEQ ID NO: 3316 - RNA, 20 nt, synthetic construct
  source 1..20: mol_type = other RNA
ctgtgactttggaaggtaag

SEQ ID NO: 3317 - RNA, 20 nt, synthetic construct
  source 1..20: mol_type = other RNA
tctgtgactttggaaggtaa

SEQ ID NO: 3318 - RNA, 20 nt, synthetic construct
  source 1..20: mol_type = other RNA
gggatattaaaccgcagaac

SEQ ID NO: 3319 - RNA, 20 nt, synthetic construct
  source 1..20: mol_type = other RNA
cgggatattaaaccgcagaa

SEQ ID NO: 3320 - RNA, 20 nt, synthetic construct
  source 1..20: mol_type = other RNA
tcgggatattaaaccgcaga

SEQ ID NO: 3321 - RNA, 20 nt, synthetic construct
  source 1..20: mol_type = other RNA
atcgggatattaaaccgcag

SEQ ID NO: 3322 - RNA, 20 nt, synthetic construct
  source 1..20: mol_type = other RNA
catcgggatattaaaccgca

SEQ ID NO: 3323 - RNA, 20 nt, synthetic construct
  source 1..20: mol_type = other RNA
cagaacctcttgttggatcc

SEQ ID NO: 3324 - RNA, 20 nt, synthetic construct
  source 1..20: mol_type = other RNA
agaacctcttgttggatcct

SEQ ID NO: 3325 - RNA, 20 nt, synthetic construct
  source 1..20: mol_type = other RNA
gcagaacctcttgttggatc

SEQ ID NO: 3326 - RNA, 20 nt, synthetic construct
  source 1..20: mol_type = other RNA
cgcagaacctcttgttggat

SEQ ID NO: 3327 - RNA, 20 nt, synthetic construct
  source 1..20: mol_type = other RNA
ccgcagaacctcttgttgga

SEQ ID NO: 3328 - RNA, 20 nt, synthetic construct
  source 1..20: mol_type = other RNA
accgcagaacctcttgttgg

SEQ ID NO: 3329 - RNA, 20 nt, synthetic construct
  source 1..20: mol_type = other RNA
gccatcaagaaagtattgca

SEQ ID NO: 3330 - RNA, 20 nt, synthetic construct
  source 1..20: mol_type = other RNA
cgccatcaagaaagtattgc

SEQ ID NO: 3331 - RNA, 20 nt, synthetic construct
  source 1..20: mol_type = other RNA
tcaagaaagtattgcaggac

SEQ ID NO: 3332 - RNA, 20 nt, synthetic construct
  source 1..20: mol_type = other RNA
atcaagaaagtattgcagga

SEQ ID NO: 3333 - RNA, 20 nt, synthetic construct
  source 1..20: mol_type = other RNA
catcaagaaagtattgcagg

SEQ ID NO: 3334 - RNA, 20 nt, synthetic construct
  source 1..20: mol_type = other RNA
ccatcaagaaagtattgcag

SEQ ID NO: 3335 - RNA, 20 nt, synthetic construct
  source 1..20: mol_type = other RNA
ccaactgcgtagtggacagt

SEQ ID NO: 3336 - RNA, 20 nt, synthetic construct
  source 1..20: mol_type = other RNA
ctaccaactgcgtagtggac

SEQ ID NO: 3337 - RNA, 20 nt, synthetic construct
  source 1..20: mol_type = other RNA
accaactgcgtagtggacag

SEQ ID NO: 3338 - RNA, 20 nt, synthetic construct
  source 1..20: mol_type = other RNA
taccaactgcgtagtggaca

SEQ ID NO: 3339 - RNA, 20 nt, synthetic construct
  source 1..20: mol_type = other RNA
tctaccaactgcgtagtgga

SEQ ID NO: 3340 - RNA, 20 nt, synthetic construct
  source 1..20: mol_type = other RNA
atctaccaactgcgtagtgg

SEQ ID NO: 3341 - RNA, 20 nt, synthetic construct
  source 1..20: mol_type = other RNA
ctcaaagatctcaagcacaa

SEQ ID NO: 3342 - RNA, 20 nt, synthetic construct
  source 1..20: mol_type = other RNA
caaagatctcaagcacaatg

SEQ ID NO: 3343 - RNA, 20 nt, synthetic construct
  source 1..20: mol_type = other RNA
tcaaagatctcaagcacaat

SEQ ID NO: 3344 - RNA, 20 nt, synthetic construct
  source 1..20: mol_type = other RNA
tctcaaagatctcaagcaca

SEQ ID NO: 3345 - RNA, 20 nt, synthetic construct
  source 1..20: mol_type = other RNA
ttctcaaagatctcaagcac

SEQ ID NO: 3346 - RNA, 20 nt, synthetic construct
  source 1..20: mol_type = other RNA
attctcaaagatctcaagca

SEQ ID NO: 3347 - RNA, 20 nt, synthetic construct
  source 1..20: mol_type = other RNA
gattctcaaagatctcaagc

SEQ ID NO: 3348 - RNA, 20 nt, synthetic construct
  source 1..20: mol_type = other RNA
tcactgaccacggccacggg

SEQ ID NO: 3349 - RNA, 20 nt, synthetic construct
  source 1..20: mol_type = other RNA
atcactgaccacggccacgg

SEQ ID NO: 3350 - RNA, 20 nt, synthetic construct
  source 1..20: mol_type = other RNA
cactgaccacggccacggga

SEQ ID NO: 3351 - RNA, 20 nt, synthetic construct
  source 1..20: mol_type = other RNA
actgaccacggccacgggag

SEQ ID NO: 3352 - RNA, 20 nt, synthetic construct
  source 1..20: mol_type = other RNA
ctgaccacggccacgggaga

SEQ ID NO: 3353 - RNA, 20 nt, synthetic construct
  source 1..20: mol_type = other RNA
tcacggaactgcatagtgga

SEQ ID NO: 3354 - RNA, 20 nt, synthetic construct
  source 1..20: mol_type = other RNA
cacggaactgcatagtggat

SEQ ID NO: 3355 - RNA, 20 nt, synthetic construct
  source 1..20: mol_type = other RNA
ggaactgcatagtggatggc

SEQ ID NO: 3356 - RNA, 20 nt, synthetic construct
  source 1..20: mol_type = other RNA
gtcacggaactgcatagtgg

SEQ ID NO: 3357 - RNA, 20 nt, synthetic construct
  source 1..20: mol_type = other RNA
acggaactgcatagtggatg

SEQ ID NO: 3358 - RNA, 20 nt, synthetic construct
  source 1..20: mol_type = other RNA
cggaactgcatagtggatgg

SEQ ID NO: 3359 - RNA, 20 nt, synthetic construct
  source 1..20: mol_type = other RNA
ttggctgaagaaattcccag

SEQ ID NO: 3360 - RNA, 20 nt, synthetic construct
  source 1..20: mol_type = other RNA
tggctgaagaaattcccagg

SEQ ID NO: 3361 - RNA, 20 nt, synthetic construct
  source 1..20: mol_type = other RNA
ggctgaagaaattcccaggg

SEQ ID NO: 3362 - RNA, 20 nt, synthetic construct
  source 1..20: mol_type = other RNA
gctgaagaaattcccagggg

SEQ ID NO: 3363 - RNA, 20 nt, synthetic construct
  source 1..20: mol_type = other RNA
ctgaagaaattcccagggga

SEQ ID NO: 3364 - RNA, 20 nt, synthetic construct
  source 1..20: mol_type = other RNA
tgaagaaattcccaggggat

SEQ ID NO: 3365 - RNA, 20 nt, synthetic construct
  source 1..20: mol_type = other RNA
gtgacagattatggctttaa

SEQ ID NO: 3366 - RNA, 20 nt, synthetic construct
  source 1..20: mol_type = other RNA
cagattatggctttaacgac

SEQ ID NO: 3367 - RNA, 20 nt, synthetic construct
  source 1..20: mol_type = other RNA
acagattatggctttaacga

SEQ ID NO: 3368 - RNA, 20 nt, synthetic construct
  source 1..20: mol_type = other RNA
gacagattatggctttaacg

SEQ ID NO: 3369 - RNA, 20 nt, synthetic construct
  source 1..20: mol_type = other RNA
tgacagattatggctttaac

SEQ ID NO: 3370 - RNA, 20 nt, synthetic construct
  source 1..20: mol_type = other RNA
gaaactgtgtggtagatggg

SEQ ID NO: 3371 - RNA, 20 nt, synthetic construct
  source 1..20: mol_type = other RNA
tcgaaactgtgtggtagatg

SEQ ID NO: 3372 - RNA, 20 nt, synthetic construct
  source 1..20: mol_type = other RNA
ctcgaaactgtgtggtagat

SEQ ID NO: 3373 - RNA, 20 nt, synthetic construct
  source 1..20: mol_type = other RNA
tctcgaaactgtgtggtaga

SEQ ID NO: 3374 - RNA, 20 nt, synthetic construct
  source 1..20: mol_type = other RNA
cgaaactgtgtggtagatgg

SEQ ID NO: 3375 - RNA, 20 nt, synthetic construct
  source 1..20: mol_type = other RNA
gtctcgaaactgtgtggtag

SEQ ID NO: 3376 - RNA, 20 nt, synthetic construct
  source 1..20: mol_type = other RNA
tcattgactacaccctgtcg

SEQ ID NO: 3377 - RNA, 20 nt, synthetic construct
  source 1..20: mol_type = other RNA
atcattgactacaccctgtc

SEQ ID NO: 3378 - RNA, 20 nt, synthetic construct
  source 1..20: mol_type = other RNA
cattgactacaccctgtcgc

SEQ ID NO: 3379 - RNA, 20 nt, synthetic construct
  source 1..20: mol_type = other RNA
attgactacaccctgtcgcg

SEQ ID NO: 3380 - RNA, 20 nt, synthetic construct
  source 1..20: mol_type = other RNA
ttgactacaccctgtcgcgc

SEQ ID NO: 3381 - RNA, 20 nt, synthetic construct
  source 1..20: mol_type = other RNA
caccgagacttacactgggg

SEQ ID NO: 3382 - RNA, 20 nt, synthetic construct
  source 1..20: mol_type = other RNA
ggggaacgtgctcttaaaga

SEQ ID NO: 3383 - RNA, 20 nt, synthetic construct
  source 1..20: mol_type = other RNA
gggaacgtgctcttaaagaa

SEQ ID NO: 3384 - RNA, 20 nt, synthetic construct
  source 1..20: mol_type = other RNA
ggaacgtgctcttaaagaaa

SEQ ID NO: 3385 - RNA, 20 nt, synthetic construct
  source 1..20: mol_type = other RNA
ttgctgactttggcctggcc

SEQ ID NO: 3386 - RNA, 20 nt, synthetic construct
  source 1..20: mol_type = other RNA
tgctgactttggcctggccc

SEQ ID NO: 3387 - RNA, 20 nt, synthetic construct
  source 1..20: mol_type = other RNA
gctgactttggcctggcccg

SEQ ID NO: 3388 - RNA, 20 nt, synthetic construct
  source 1..20: mol_type = other RNA
attgctgactttggcctggc

SEQ ID NO: 3389 - RNA, 20 nt, synthetic construct
  source 1..20: mol_type = other RNA
ctgactttggcctggcccgg

SEQ ID NO: 3390 - RNA, 20 nt, synthetic construct
  source 1..20: mol_type = other RNA
caccgagacctccgagctgc

SEQ ID NO: 3391 - RNA, 20 nt, synthetic construct
  source 1..20: mol_type = other RNA
accgagacctccgagctgcc

SEQ ID NO: 3392 - RNA, 20 nt, synthetic construct
  source 1..20: mol_type = other RNA
ccgagacctccgagctgcca

SEQ ID NO: 3393 - RNA, 20 nt, synthetic construct
  source 1..20: mol_type = other RNA
cgagacctccgagctgccaa

SEQ ID NO: 3394 - RNA, 20 nt, synthetic construct
  source 1..20: mol_type = other RNA
gagacctccgagctgccaac

SEQ ID NO: 3395 - RNA, 20 nt, synthetic construct
  source 1..20: mol_type = other RNA
gctgccaacatcttggtctc

SEQ ID NO: 3396 - RNA, 20 nt, synthetic construct
  source 1..20: mol_type = other RNA
agctgccaacatcttggtct

SEQ ID NO: 3397 - RNA, 20 nt, synthetic construct
  source 1..20: mol_type = other RNA
ctgccaacatcttggtctct

SEQ ID NO: 3398 - RNA, 20 nt, synthetic construct
  source 1..20: mol_type = other RNA
tgccaacatcttggtctctg

SEQ ID NO: 3399 - RNA, 20 nt, synthetic construct
  source 1..20: mol_type = other RNA
gccaacatcttggtctctgc

SEQ ID NO: 3400 - RNA, 20 nt, synthetic construct
  source 1..20: mol_type = other RNA
ccaacatcttggtctctgca

SEQ ID NO: 3401 - RNA, 20 nt, synthetic construct
  source 1..20: mol_type = other RNA
gcagtgaagacgatgaagcc

SEQ ID NO: 3402 - RNA, 20 nt, synthetic construct
  source 1..20: mol_type = other RNA
cagtgaagacgatgaagcca

SEQ ID NO: 3403 - RNA, 20 nt, synthetic construct
  source 1..20: mol_type = other RNA
agtgaagacgatgaagccag

SEQ ID NO: 3404 - RNA, 20 nt, synthetic construct
  source 1..20: mol_type = other RNA
tgaagacgatgaagccaggg

SEQ ID NO: 3405 - RNA, 20 nt, synthetic construct
  source 1..20: mol_type = other RNA
ggcagtgaagacgatgaagc

SEQ ID NO: 3406 - RNA, 20 nt, synthetic construct
  source 1..20: mol_type = other RNA
gtgaagacgatgaagccagg

SEQ ID NO: 3407 - RNA, 20 nt, synthetic construct
  source 1..20: mol_type = other RNA
tcattgactttggttctgct

SEQ ID NO: 3408 - RNA, 20 nt, synthetic construct
  source 1..20: mol_type = other RNA
gtcattgactttggttctgc

SEQ ID NO: 3409 - RNA, 20 nt, synthetic construct
  source 1..20: mol_type = other RNA
cattgactttggttctgcta

SEQ ID NO: 3410 - RNA, 20 nt, synthetic construct
  source 1..20: mol_type = other RNA
attgactttggttctgctag

SEQ ID NO: 3411 - RNA, 20 nt, synthetic construct
  source 1..20: mol_type = other RNA
ttgactttggttctgctagt

SEQ ID NO: 3412 - RNA, 20 nt, synthetic construct
  source 1..20: mol_type = other RNA
cacgctgaccttaagcctga

SEQ ID NO: 3413 - RNA, 20 nt, synthetic construct
  source 1..20: mol_type = other RNA
acgctgaccttaagcctgaa

SEQ ID NO: 3414 - RNA, 20 nt, synthetic construct
  source 1..20: mol_type = other RNA
cgctgaccttaagcctgaaa

SEQ ID NO: 3415 - RNA, 20 nt, synthetic construct
  source 1..20: mol_type = other RNA
gctgaccttaagcctgaaaa

SEQ ID NO: 3416 - RNA, 20 nt, synthetic construct
  source 1..20: mol_type = other RNA
ctgaccttaagcctgaaaac

SEQ ID NO: 3417 - RNA, 20 nt, synthetic construct
  source 1..20: mol_type = other RNA
cctgaaaacatcatgctggt

SEQ ID NO: 3418 - RNA, 20 nt, synthetic construct
  source 1..20: mol_type = other RNA
gcctgaaaacatcatgctgg

SEQ ID NO: 3419 - RNA, 20 nt, synthetic construct
  source 1..20: mol_type = other RNA
ctgaaaacatcatgctggtt

SEQ ID NO: 3420 - RNA, 20 nt, synthetic construct
  source 1..20: mol_type = other RNA
tgaaaacatcatgctggttg

SEQ ID NO: 3421 - RNA, 20 nt, synthetic construct
  source 1..20: mol_type = other RNA
gaaaacatcatgctggttga

SEQ ID NO: 3422 - RNA, 20 nt, synthetic construct
  source 1..20: mol_type = other RNA
aaaacatcatgctggttgat

SEQ ID NO: 3423 - RNA, 20 nt, synthetic construct
  source 1..20: mol_type = other RNA
ggctattaaaatcttgaaga

SEQ ID NO: 3424 - RNA, 20 nt, synthetic construct
  source 1..20: mol_type = other RNA
gctattaaaatcttgaagaa

SEQ ID NO: 3425 - RNA, 20 nt, synthetic construct
  source 1..20: mol_type = other RNA
ctattaaaatcttgaagaac

SEQ ID NO: 3426 - RNA, 20 nt, synthetic construct
  source 1..20: mol_type = other RNA
tattaaaatcttgaagaacc

SEQ ID NO: 3427 - RNA, 20 nt, synthetic construct
  source 1..20: mol_type = other RNA
attaaaatcttgaagaacca

SEQ ID NO: 3428 - RNA, 20 nt, synthetic construct
  source 1..20: mol_type = other RNA
ttaaaatcttgaagaaccac

SEQ ID NO: 3429 - RNA, 20 nt, synthetic construct
  source 1..20: mol_type = other RNA
taaaatcttgaagaaccacc

SEQ ID NO: 3430 - RNA, 20 nt, synthetic construct
  source 1..20: mol_type = other RNA
tcatcgactttggttcagcc

SEQ ID NO: 3431 - RNA, 20 nt, synthetic construct
  source 1..20: mol_type = other RNA
tcgactttggttcagccagc

SEQ ID NO: 3432 - RNA, 20 nt, synthetic construct
  source 1..20: mol_type = other RNA
atcgactttggttcagccag

SEQ ID NO: 3433 - RNA, 20 nt, synthetic construct
  source 1..20: mol_type = other RNA
catcgactttggttcagcca

SEQ ID NO: 3434 - RNA, 20 nt, synthetic construct
  source 1..20: mol_type = other RNA
gtcatcgactttggttcagc

SEQ ID NO: 3435 - RNA, 20 nt, synthetic construct
  source 1..20: mol_type = other RNA
ctgacctcaaaccagaaaac

SEQ ID NO: 3436 - RNA, 20 nt, synthetic construct
  source 1..20: mol_type = other RNA
gctgacctcaaaccagaaaa

SEQ ID NO: 3437 - RNA, 20 nt, synthetic construct
  source 1..20: mol_type = other RNA
cgctgacctcaaaccagaaa

SEQ ID NO: 3438 - RNA, 20 nt, synthetic construct
  source 1..20: mol_type = other RNA
acgctgacctcaaaccagaa

SEQ ID NO: 3439 - RNA, 20 nt, synthetic construct
  source 1..20: mol_type = other RNA
cacgctgacctcaaaccaga

SEQ ID NO: 3440 - RNA, 20 nt, synthetic construct
  source 1..20: mol_type = other RNA
ccagaaaacatcatgctggt

SEQ ID NO: 3441 - RNA, 20 nt, synthetic construct
  source 1..20: mol_type = other RNA
accagaaaacatcatgctgg

SEQ ID NO: 3442 - RNA, 20 nt, synthetic construct
  source 1..20: mol_type = other RNA
aaaacatcatgctggtggat

SEQ ID NO: 3443 - RNA, 20 nt, synthetic construct
  source 1..20: mol_type = other RNA
gaaaacatcatgctggtgga

SEQ ID NO: 3444 - RNA, 20 nt, synthetic construct
  source 1..20: mol_type = other RNA
agaaaacatcatgctggtgg

SEQ ID NO: 3445 - RNA, 20 nt, synthetic construct
  source 1..20: mol_type = other RNA
cagaaaacatcatgctggtg

SEQ ID NO: 3446 - RNA, 20 nt, synthetic construct
  source 1..20: mol_type = other RNA
tcaagatcctgaagaaccac

SEQ ID NO: 3447 - RNA, 20 nt, synthetic construct
  source 1..20: mol_type = other RNA
atcaagatcctgaagaacca

SEQ ID NO: 3448 - RNA, 20 nt, synthetic construct
  source 1..20: mol_type = other RNA
catcaagatcctgaagaacc

SEQ ID NO: 3449 - RNA, 20 nt, synthetic construct
  source 1..20: mol_type = other RNA
ccatcaagatcctgaagaac

SEQ ID NO: 3450 - RNA, 20 nt, synthetic construct
  source 1..20: mol_type = other RNA
gccatcaagatcctgaagaa

SEQ ID NO: 3451 - RNA, 20 nt, synthetic construct
  source 1..20: mol_type = other RNA
agccatcaagatcctgaaga

SEQ ID NO: 3452 - RNA, 20 nt, synthetic construct
  source 1..20: mol_type = other RNA
taatagactttgggtcggcc

SEQ ID NO: 3453 - RNA, 20 nt, synthetic construct
  source 1..20: mol_type = other RNA
gtaatagactttgggtcggc

SEQ ID NO: 3454 - RNA, 20 nt, synthetic construct
  source 1..20: mol_type = other RNA
aatagactttgggtcggcca

SEQ ID NO: 3455 - RNA, 20 nt, synthetic construct
  source 1..20: mol_type = other RNA
atagactttgggtcggccag

SEQ ID NO: 3456 - RNA, 20 nt, synthetic construct
  source 1..20: mol_type = other RNA
tagactttgggtcggccagt

SEQ ID NO: 3457 - RNA, 20 nt, synthetic construct
  source 1..20: mol_type = other RNA
catgctgatctcaagccaga

SEQ ID NO: 3458 - RNA, 20 nt, synthetic construct
  source 1..20: mol_type = other RNA
atgctgatctcaagccagag

SEQ ID NO: 3459 - RNA, 20 nt, synthetic construct
  source 1..20: mol_type = other RNA
tgctgatctcaagccagaga

SEQ ID NO: 3460 - RNA, 20 nt, synthetic construct
  source 1..20: mol_type = other RNA
gctgatctcaagccagagaa

SEQ ID NO: 3461 - RNA, 20 nt, synthetic construct
  source 1..20: mol_type = other RNA
ctgatctcaagccagagaat

SEQ ID NO: 3462 - RNA, 20 nt, synthetic construct
  source 1..20: mol_type = other RNA
gccagagaatattatgttgg

SEQ ID NO: 3463 - RNA, 20 nt, synthetic construct
  source 1..20: mol_type = other RNA
ccagagaatattatgttggt

SEQ ID NO: 3464 - RNA, 20 nt, synthetic construct
  source 1..20: mol_type = other RNA
cagagaatattatgttggtg

SEQ ID NO: 3465 - RNA, 20 nt, synthetic construct
  source 1..20: mol_type = other RNA
agagaatattatgttggtgg

SEQ ID NO: 3466 - RNA, 20 nt, synthetic construct
  source 1..20: mol_type = other RNA
gagaatattatgttggtgga

SEQ ID NO: 3467 - RNA, 20 nt, synthetic construct
  source 1..20: mol_type = other RNA
agaatattatgttggtggat

SEQ ID NO: 3468 - RNA, 20 nt, synthetic construct
  source 1..20: mol_type = other RNA
tgattgacttcggatccgcc

SEQ ID NO: 3469 - RNA, 20 nt, synthetic construct
  source 1..20: mol_type = other RNA
ttgacttcggatccgccagc

SEQ ID NO: 3470 - RNA, 20 nt, synthetic construct
  source 1..20: mol_type = other RNA
attgacttcggatccgccag

SEQ ID NO: 3471 - RNA, 20 nt, synthetic construct
  source 1..20: mol_type = other RNA
gattgacttcggatccgcca

SEQ ID NO: 3472 - RNA, 20 nt, synthetic construct
  source 1..20: mol_type = other RNA
gtgattgacttcggatccgc

SEQ ID NO: 3473 - RNA, 20 nt, synthetic construct
  source 1..20: mol_type = other RNA
ctgatctcaagcctgagaac

SEQ ID NO: 3474 - RNA, 20 nt, synthetic construct
  source 1..20: mol_type = other RNA
gctgatctcaagcctgagaa

SEQ ID NO: 3475 - RNA, 20 nt, synthetic construct
  source 1..20: mol_type = other RNA
cgctgatctcaagcctgaga

SEQ ID NO: 3476 - RNA, 20 nt, synthetic construct
  source 1..20: mol_type = other RNA
acgctgatctcaagcctgag

SEQ ID NO: 3477 - RNA, 20 nt, synthetic construct
  source 1..20: mol_type = other RNA
cacgctgatctcaagcctga

SEQ ID NO: 3478 - RNA, 20 nt, synthetic construct
  source 1..20: mol_type = other RNA
cctgagaacatcatgctggt

SEQ ID NO: 3479 - RNA, 20 nt, synthetic construct
  source 1..20: mol_type = other RNA
gcctgagaacatcatgctgg

SEQ ID NO: 3480 - RNA, 20 nt, synthetic construct
  source 1..20: mol_type = other RNA
agaacatcatgctggtggac

SEQ ID NO: 3481 - RNA, 20 nt, synthetic construct
  source 1..20: mol_type = other RNA
gagaacatcatgctggtgga

SEQ ID NO: 3482 - RNA, 20 nt, synthetic construct
  source 1..20: mol_type = other RNA
tgagaacatcatgctggtgg

SEQ ID NO: 3483 - RNA, 20 nt, synthetic construct
  source 1..20: mol_type = other RNA
ctgagaacatcatgctggtg

SEQ ID NO: 3484 - RNA, 20 nt, synthetic construct
  source 1..20: mol_type = other RNA
atcaagatcctcaagaatga

SEQ ID NO: 3485 - RNA, 20 nt, synthetic construct
  source 1..20: mol_type = other RNA
gccatcaagatcctcaagaa

SEQ ID NO: 3486 - RNA, 20 nt, synthetic construct
  source 1..20: mol_type = other RNA
tcaagatcctcaagaatgac

SEQ ID NO: 3487 - RNA, 20 nt, synthetic construct
  source 1..20: mol_type = other RNA
catcaagatcctcaagaatg

SEQ ID NO: 3488 - RNA, 20 nt, synthetic construct
  source 1..20: mol_type = other RNA
ccatcaagatcctcaagaat

SEQ ID NO: 3489 - RNA, 20 nt, synthetic construct
  source 1..20: mol_type = other RNA
ggccatcaagatcctcaaga

SEQ ID NO: 3490 - RNA, 20 nt, synthetic construct
  source 1..20: mol_type = other RNA
cagactttggtttgagcaac

SEQ ID NO: 3491 - RNA, 20 nt, synthetic construct
  source 1..20: mol_type = other RNA
tttgcagactttggtttgag

SEQ ID NO: 3492 - RNA, 20 nt, synthetic construct
  source 1..20: mol_type = other RNA
ttgcagactttggtttgagc

SEQ ID NO: 3493 - RNA, 20 nt, synthetic construct
  source 1..20: mol_type = other RNA
tgcagactttggtttgagca

SEQ ID NO: 3494 - RNA, 20 nt, synthetic construct
  source 1..20: mol_type = other RNA
gcagactttggtttgagcaa

SEQ ID NO: 3495 - RNA, 20 nt, synthetic construct
  source 1..20: mol_type = other RNA
ttcagagacttgaagataga

SEQ ID NO: 3496 - RNA, 20 nt, synthetic construct
  source 1..20: mol_type = other RNA
tcagagacttgaagatagag

SEQ ID NO: 3497 - RNA, 20 nt, synthetic construct
  source 1..20: mol_type = other RNA
cagagacttgaagatagaga

SEQ ID NO: 3498 - RNA, 20 nt, synthetic construct
  source 1..20: mol_type = other RNA
agagacttgaagatagagaa

SEQ ID NO: 3499 - RNA, 20 nt, synthetic construct
  source 1..20: mol_type = other RNA
gagacttgaagatagagaat

SEQ ID NO: 3500 - RNA, 20 nt, synthetic construct
  source 1..20: mol_type = other RNA
atagagaatttgctactaga

SEQ ID NO: 3501 - RNA, 20 nt, synthetic construct
  source 1..20: mol_type = other RNA
gagaatttgctactagatga

SEQ ID NO: 3502 - RNA, 20 nt, synthetic construct
  source 1..20: mol_type = other RNA
gatagagaatttgctactag

SEQ ID NO: 3503 - RNA, 20 nt, synthetic construct
  source 1..20: mol_type = other RNA
tagagaatttgctactagat

SEQ ID NO: 3504 - RNA, 20 nt, synthetic construct
  source 1..20: mol_type = other RNA
agagaatttgctactagatg

SEQ ID NO: 3505 - RNA, 20 nt, synthetic construct
  source 1..20: mol_type = other RNA
agaatttgctactagatgaa

SEQ ID NO: 3506 - RNA, 20 nt, synthetic construct
  source 1..20: mol_type = other RNA
ggccataaaagtcattgata

SEQ ID NO: 3507 - RNA, 20 nt, synthetic construct
  source 1..20: mol_type = other RNA
cataaaagtcattgataaga

SEQ ID NO: 3508 - RNA, 20 nt, synthetic construct
  source 1..20: mol_type = other RNA
taaaagtcattgataagaag

SEQ ID NO: 3509 - RNA, 20 nt, synthetic construct
  source 1..20: mol_type = other RNA
gccataaaagtcattgataa

SEQ ID NO: 3510 - RNA, 20 nt, synthetic construct
  source 1..20: mol_type = other RNA
ccataaaagtcattgataag

SEQ ID NO: 3511 - RNA, 20 nt, synthetic construct
  source 1..20: mol_type = other RNA
ataaaagtcattgataagaa

SEQ ID NO: 3512 - RNA, 20 nt, synthetic construct
  source 1..20: mol_type = other RNA
aaaagtcattgataagaaga

SEQ ID NO: 3513 - RNA, 20 nt, synthetic construct
  source 1..20: mol_type = other RNA
tttagactttggtgacatga

SEQ ID NO: 3514 - RNA, 20 nt, synthetic construct
  source 1..20: mol_type = other RNA
ttagactttggtgacatgag

SEQ ID NO: 3515 - RNA, 20 nt, synthetic construct
  source 1..20: mol_type = other RNA
tagactttggtgacatgagc

SEQ ID NO: 3516 - RNA, 20 nt, synthetic construct
  source 1..20: mol_type = other RNA
cacggagatcttaatgacca

SEQ ID NO: 3517 - RNA, 20 nt, synthetic construct
  source 1..20: mol_type = other RNA
acggagatcttaatgaccat

SEQ ID NO: 3518 - RNA, 20 nt, synthetic construct
  source 1..20: mol_type = other RNA
cggagatcttaatgaccata

SEQ ID NO: 3519 - RNA, 20 nt, synthetic construct
  source 1..20: mol_type = other RNA
ggagatcttaatgaccataa

SEQ ID NO: 3520 - RNA, 20 nt, synthetic construct
  source 1..20: mol_type = other RNA
gagatcttaatgaccataat

SEQ ID NO: 3521 - RNA, 20 nt, synthetic construct
  source 1..20: mol_type = other RNA
cctcaaaataagcaacacca

SEQ ID NO: 3522 - RNA, 20 nt, synthetic construct
  source 1..20: mol_type = other RNA
ctcaaaataagcaacaccaa

SEQ ID NO: 3523 - RNA, 20 nt, synthetic construct
  source 1..20: mol_type = other RNA
tgtcctcaaaataagcaaca

SEQ ID NO: 3524 - RNA, 20 nt, synthetic construct
  source 1..20: mol_type = other RNA
gtcctcaaaataagcaacac

SEQ ID NO: 3525 - RNA, 20 nt, synthetic construct
  source 1..20: mol_type = other RNA
tcctcaaaataagcaacacc

SEQ ID NO: 3526 - RNA, 20 nt, synthetic construct
  source 1..20: mol_type = other RNA
tcaaaataagcaacaccaag

SEQ ID NO: 3527 - RNA, 20 nt, synthetic construct
  source 1..20: mol_type = other RNA
caaaataagcaacaccaagg

SEQ ID NO: 3528 - RNA, 20 nt, synthetic construct
  source 1..20: mol_type = other RNA
gagaccttgctgcccggaat

SEQ ID NO: 3529 - RNA, 20 nt, synthetic construct
  source 1..20: mol_type = other RNA
cacagagaccttgctgcccg

SEQ ID NO: 3530 - RNA, 20 nt, synthetic construct
  source 1..20: mol_type = other RNA
acagagaccttgctgcccgg

SEQ ID NO: 3531 - RNA, 20 nt, synthetic construct
  source 1..20: mol_type = other RNA
cagagaccttgctgcccgga

SEQ ID NO: 3532 - RNA, 20 nt, synthetic construct
  source 1..20: mol_type = other RNA
agagaccttgctgcccggaa

SEQ ID NO: 3533 - RNA, 20 nt, synthetic construct
  source 1..20: mol_type = other RNA
gcccggaattgcatggtagc

SEQ ID NO: 3534 - RNA, 20 nt, synthetic construct
  source 1..20: mol_type = other RNA
cggaattgcatggtagccga

SEQ ID NO: 3535 - RNA, 20 nt, synthetic construct
  source 1..20: mol_type = other RNA
tgcccggaattgcatggtag

SEQ ID NO: 3536 - RNA, 20 nt, synthetic construct
  source 1..20: mol_type = other RNA
cccggaattgcatggtagcc

SEQ ID NO: 3537 - RNA, 20 nt, synthetic construct
  source 1..20: mol_type = other RNA
ccggaattgcatggtagccg

SEQ ID NO: 3538 - RNA, 20 nt, synthetic construct
  source 1..20: mol_type = other RNA
ggaattgcatggtagccgaa

SEQ ID NO: 3539 - RNA, 20 nt, synthetic construct
  source 1..20: mol_type = other RNA
ggccattaaaacagtgaacg

SEQ ID NO: 3540 - RNA, 20 nt, synthetic construct
  source 1..20: mol_type = other RNA
gccattaaaacagtgaacga

SEQ ID NO: 3541 - RNA, 20 nt, synthetic construct
  source 1..20: mol_type = other RNA
attaaaacagtgaacgaggc

SEQ ID NO: 3542 - RNA, 20 nt, synthetic construct
  source 1..20: mol_type = other RNA
ccattaaaacagtgaacgag

SEQ ID NO: 3543 - RNA, 20 nt, synthetic construct
  source 1..20: mol_type = other RNA
cattaaaacagtgaacgagg

SEQ ID NO: 3544 - RNA, 20 nt, synthetic construct
  source 1..20: mol_type = other RNA
ttaaaacagtgaacgaggcc

SEQ ID NO: 3545 - RNA, 20 nt, synthetic construct
  source 1..20: mol_type = other RNA
taaaacagtgaacgaggccg

SEQ ID NO: 3546 - RNA, 20 nt, synthetic construct
  source 1..20: mol_type = other RNA
tattgacctaggatatgcca

SEQ ID NO: 3547 - RNA, 20 nt, synthetic construct
  source 1..20: mol_type = other RNA
attgacctaggatatgccaa

SEQ ID NO: 3548 - RNA, 20 nt, synthetic construct
  source 1..20: mol_type = other RNA
attattgacctaggatatgc

SEQ ID NO: 3549 - RNA, 20 nt, synthetic construct
  source 1..20: mol_type = other RNA
ttattgacctaggatatgcc

SEQ ID NO: 3550 - RNA, 20 nt, synthetic construct
  source 1..20: mol_type = other RNA
ttgacctaggatatgccaag

SEQ ID NO: 3551 - RNA, 20 nt, synthetic construct
  source 1..20: mol_type = other RNA
catcgggatctaaagccaga

SEQ ID NO: 3552 - RNA, 20 nt, synthetic construct
  source 1..20: mol_type = other RNA
atcgggatctaaagccagaa

SEQ ID NO: 3553 - RNA, 20 nt, synthetic construct
  source 1..20: mol_type = other RNA
tcgggatctaaagccagaaa

SEQ ID NO: 3554 - RNA, 20 nt, synthetic construct
  source 1..20: mol_type = other RNA
cgggatctaaagccagaaaa

SEQ ID NO: 3555 - RNA, 20 nt, synthetic construct
  source 1..20: mol_type = other RNA
gggatctaaagccagaaaac

SEQ ID NO: 3556 - RNA, 20 nt, synthetic construct
  source 1..20: mol_type = other RNA
gccagaaaacatcgtcctgc

SEQ ID NO: 3557 - RNA, 20 nt, synthetic construct
  source 1..20: mol_type = other RNA
gaaaacatcgtcctgcagca

SEQ ID NO: 3558 - RNA, 20 nt, synthetic construct
  source 1..20: mol_type = other RNA
aaaacatcgtcctgcagcaa

SEQ ID NO: 3559 - RNA, 20 nt, synthetic construct
  source 1..20: mol_type = other RNA
ccagaaaacatcgtcctgca

SEQ ID NO: 3560 - RNA, 20 nt, synthetic construct
  source 1..20: mol_type = other RNA
cagaaaacatcgtcctgcag

SEQ ID NO: 3561 - RNA, 20 nt, synthetic construct
  source 1..20: mol_type = other RNA
agaaaacatcgtcctgcagc

SEQ ID NO: 3562 - RNA, 20 nt, synthetic construct
  source 1..20: mol_type = other RNA
tgccatcaagcagtgccggc

SEQ ID NO: 3563 - RNA, 20 nt, synthetic construct
  source 1..20: mol_type = other RNA
gccatcaagcagtgccggca

SEQ ID NO: 3564 - RNA, 20 nt, synthetic construct
  source 1..20: mol_type = other RNA
catcaagcagtgccggcagg

SEQ ID NO: 3565 - RNA, 20 nt, synthetic construct
  source 1..20: mol_type = other RNA
ccatcaagcagtgccggcag

SEQ ID NO: 3566 - RNA, 20 nt, synthetic construct
  source 1..20: mol_type = other RNA
atcaagcagtgccggcagga

SEQ ID NO: 3567 - RNA, 20 nt, synthetic construct
  source 1..20: mol_type = other RNA
tcaagcagtgccggcaggag

SEQ ID NO: 3568 - RNA, 20 nt, synthetic construct
  source 1..20: mol_type = other RNA
tgacagacttcggcgctgcc

SEQ ID NO: 3569 - RNA, 20 nt, synthetic construct
  source 1..20: mol_type = other RNA
gacagacttcggcgctgccc

SEQ ID NO: 3570 - RNA, 20 nt, synthetic construct
  source 1..20: mol_type = other RNA
acagacttcggcgctgcccg

SEQ ID NO: 3571 - RNA, 20 nt, synthetic construct
  source 1..20: mol_type = other RNA
ctgacagacttcggcgctgc

SEQ ID NO: 3572 - RNA, 20 nt, synthetic construct
  source 1..20: mol_type = other RNA
cagacttcggcgctgcccgg

SEQ ID NO: 3573 - RNA, 20 nt, synthetic construct
  source 1..20: mol_type = other RNA
catcgcgacatcaagccggg

SEQ ID NO: 3574 - RNA, 20 nt, synthetic construct
  source 1..20: mol_type = other RNA
atcgcgacatcaagccgggg

SEQ ID NO: 3575 - RNA, 20 nt, synthetic construct
  source 1..20: mol_type = other RNA
tcgcgacatcaagccgggga

SEQ ID NO: 3576 - RNA, 20 nt, synthetic construct
  source 1..20: mol_type = other RNA
cgcgacatcaagccggggaa

SEQ ID NO: 3577 - RNA, 20 nt, synthetic construct
  source 1..20: mol_type = other RNA
gcgacatcaagccggggaac

SEQ ID NO: 3578 - RNA, 20 nt, synthetic construct
  source 1..20: mol_type = other RNA
ccggggaacatcatgcgcct

SEQ ID NO: 3579 - RNA, 20 nt, synthetic construct
  source 1..20: mol_type = other RNA
gggaacatcatgcgcctcgt

SEQ ID NO: 3580 - RNA, 20 nt, synthetic construct
  source 1..20: mol_type = other RNA
ggaacatcatgcgcctcgta

SEQ ID NO: 3581 - RNA, 20 nt, synthetic construct
  source 1..20: mol_type = other RNA
gccggggaacatcatgcgcc

SEQ ID NO: 3582 - RNA, 20 nt, synthetic construct
  source 1..20: mol_type = other RNA
cggggaacatcatgcgcctc

SEQ ID NO: 3583 - RNA, 20 nt, synthetic construct
  source 1..20: mol_type = other RNA
ggggaacatcatgcgcctcg

SEQ ID NO: 3584 - RNA, 20 nt, synthetic construct
  source 1..20: mol_type = other RNA
tgaaggtcttcaacactacc

SEQ ID NO: 3585 - RNA, 20 nt, synthetic construct
  source 1..20: mol_type = other RNA
tgctgtgaaggtcttcaaca

SEQ ID NO: 3586 - RNA, 20 nt, synthetic construct
  source 1..20: mol_type = other RNA
gctgtgaaggtcttcaacac

SEQ ID NO: 3587 - RNA, 20 nt, synthetic construct
  source 1..20: mol_type = other RNA
ctgtgaaggtcttcaacact

SEQ ID NO: 3588 - RNA, 20 nt, synthetic construct
  source 1..20: mol_type = other RNA
tgtgaaggtcttcaacacta

SEQ ID NO: 3589 - RNA, 20 nt, synthetic construct
  source 1..20: mol_type = other RNA
gtgaaggtcttcaacactac

SEQ ID NO: 3590 - RNA, 20 nt, synthetic construct
  source 1..20: mol_type = other RNA
atggctgatgtcaagttctc

SEQ ID NO: 3591 - RNA, 20 nt, synthetic construct
  source 1..20: mol_type = other RNA
tggctgatgtcaagttctct

SEQ ID NO: 3592 - RNA, 20 nt, synthetic construct
  source 1..20: mol_type = other RNA
ggctgatgtcaagttctctt

SEQ ID NO: 3593 - RNA, 20 nt, synthetic construct
  source 1..20: mol_type = other RNA
gctgatgtcaagttctcttt

SEQ ID NO: 3594 - RNA, 20 nt, synthetic construct
  source 1..20: mol_type = other RNA
ctgatgtcaagttctctttc

SEQ ID NO: 3595 - RNA, 20 nt, synthetic construct
  source 1..20: mol_type = other RNA
tcgtgaaggtgctgaaggtt

SEQ ID NO: 3596 - RNA, 20 nt, synthetic construct
  source 1..20: mol_type = other RNA
gtgaaggtgctgaaggttcg

SEQ ID NO: 3597 - RNA, 20 nt, synthetic construct
  source 1..20: mol_type = other RNA
tgtcgtgaaggtgctgaagg

SEQ ID NO: 3598 - RNA, 20 nt, synthetic construct
  source 1..20: mol_type = other RNA
gtcgtgaaggtgctgaaggt

SEQ ID NO: 3599 - RNA, 20 nt, synthetic construct
  source 1..20: mol_type = other RNA
cgtgaaggtgctgaaggttc

SEQ ID NO: 3600 - RNA, 20 nt, synthetic construct
  source 1..20: mol_type = other RNA
tgaaggtgctgaaggttcga

SEQ ID NO: 3601 - RNA, 20 nt, synthetic construct
  source 1..20: mol_type = other RNA
tcagactttggaatgaccag

SEQ ID NO: 3602 - RNA, 20 nt, synthetic construct
  source 1..20: mol_type = other RNA
tgtcagactttggaatgacc

SEQ ID NO: 3603 - RNA, 20 nt, synthetic construct
  source 1..20: mol_type = other RNA
cagactttggaatgaccaga

SEQ ID NO: 3604 - RNA, 20 nt, synthetic construct
  source 1..20: mol_type = other RNA
gtcagactttggaatgacca

SEQ ID NO: 3605 - RNA, 20 nt, synthetic construct
  source 1..20: mol_type = other RNA
ttgtcagactttggaatgac

SEQ ID NO: 3606 - RNA, 20 nt, synthetic construct
  source 1..20: mol_type = other RNA
agaaactgcatggtcgccca

SEQ ID NO: 3607 - RNA, 20 nt, synthetic construct
  source 1..20: mol_type = other RNA
gaaactgcatggtcgcccat

SEQ ID NO: 3608 - RNA, 20 nt, synthetic construct
  source 1..20: mol_type = other RNA
gagaaactgcatggtcgccc

SEQ ID NO: 3609 - RNA, 20 nt, synthetic construct
  source 1..20: mol_type = other RNA
cgagaaactgcatggtcgcc

SEQ ID NO: 3610 - RNA, 20 nt, synthetic construct
  source 1..20: mol_type = other RNA
gcgagaaactgcatggtcgc

SEQ ID NO: 3611 - RNA, 20 nt, synthetic construct
  source 1..20: mol_type = other RNA
agcgagaaactgcatggtcg

SEQ ID NO: 3612 - RNA, 20 nt, synthetic construct
  source 1..20: mol_type = other RNA
gtgaagacggtcaacgagtc

SEQ ID NO: 3613 - RNA, 20 nt, synthetic construct
  source 1..20: mol_type = other RNA
ggcggtgaagacggtcaacg

SEQ ID NO: 3614 - RNA, 20 nt, synthetic construct
  source 1..20: mol_type = other RNA
tgaagacggtcaacgagtca

SEQ ID NO: 3615 - RNA, 20 nt, synthetic construct
  source 1..20: mol_type = other RNA
ggtgaagacggtcaacgagt

SEQ ID NO: 3616 - RNA, 20 nt, synthetic construct
  source 1..20: mol_type = other RNA
cggtgaagacggtcaacgag

SEQ ID NO: 3617 - RNA, 20 nt, synthetic construct
  source 1..20: mol_type = other RNA
gcggtgaagacggtcaacga

SEQ ID NO: 3618 - RNA, 20 nt, synthetic construct
  source 1..20: mol_type = other RNA
ccagacttcgggatgactcg

SEQ ID NO: 3619 - RNA, 20 nt, synthetic construct
  source 1..20: mol_type = other RNA
tccagacttcgggatgactc

SEQ ID NO: 3620 - RNA, 20 nt, synthetic construct
  source 1..20: mol_type = other RNA
ttccagacttcgggatgact

SEQ ID NO: 3621 - RNA, 20 nt, synthetic construct
  source 1..20: mol_type = other RNA
cagacttcgggatgactcgg

SEQ ID NO: 3622 - RNA, 20 nt, synthetic construct
  source 1..20: mol_type = other RNA
tttccagacttcgggatgac

SEQ ID NO: 3623 - RNA, 20 nt, synthetic construct
  source 1..20: mol_type = other RNA
gagatctagcagcccgcaac

SEQ ID NO: 3624 - RNA, 20 nt, synthetic construct
  source 1..20: mol_type = other RNA
cgagatctagcagcccgcaa

SEQ ID NO: 3625 - RNA, 20 nt, synthetic construct
  source 1..20: mol_type = other RNA
ccgagatctagcagcccgca

SEQ ID NO: 3626 - RNA, 20 nt, synthetic construct
  source 1..20: mol_type = other RNA
accgagatctagcagcccgc

SEQ ID NO: 3627 - RNA, 20 nt, synthetic construct
  source 1..20: mol_type = other RNA
caccgagatctagcagcccg

SEQ ID NO: 3628 - RNA, 20 nt, synthetic construct
  source 1..20: mol_type = other RNA
cgcaactgcatggtgtccca

SEQ ID NO: 3629 - RNA, 20 nt, synthetic construct
  source 1..20: mol_type = other RNA
ccgcaactgcatggtgtccc

SEQ ID NO: 3630 - RNA, 20 nt, synthetic construct
  source 1..20: mol_type = other RNA
gcaactgcatggtgtcccag

SEQ ID NO: 3631 - RNA, 20 nt, synthetic construct
  source 1..20: mol_type = other RNA
cccgcaactgcatggtgtcc

SEQ ID NO: 3632 - RNA, 20 nt, synthetic construct
  source 1..20: mol_type = other RNA
gcccgcaactgcatggtgtc

SEQ ID NO: 3633 - RNA, 20 nt, synthetic construct
  source 1..20: mol_type = other RNA
agcccgcaactgcatggtgt

SEQ ID NO: 3634 - RNA, 20 nt, synthetic construct
  source 1..20: mol_type = other RNA
ctgaagacggtgaatgagct

SEQ ID NO: 3635 - RNA, 20 nt, synthetic construct
  source 1..20: mol_type = other RNA
cctgaagacggtgaatgagc

SEQ ID NO: 3636 - RNA, 20 nt, synthetic construct
  source 1..20: mol_type = other RNA
ggccctgaagacggtgaatg

SEQ ID NO: 3637 - RNA, 20 nt, synthetic construct
  source 1..20: mol_type = other RNA
tgaagacggtgaatgagctg

SEQ ID NO: 3638 - RNA, 20 nt, synthetic construct
  source 1..20: mol_type = other RNA
ccctgaagacggtgaatgag

SEQ ID NO: 3639 - RNA, 20 nt, synthetic construct
  source 1..20: mol_type = other RNA
gccctgaagacggtgaatga

SEQ ID NO: 3640 - RNA, 20 nt, synthetic construct
  source 1..20: mol_type = other RNA
ttgactttgcacacagcaca

SEQ ID NO: 3641 - RNA, 20 nt, synthetic construct
  source 1..20: mol_type = other RNA
attgactttgcacacagcac

SEQ ID NO: 3642 - RNA, 20 nt, synthetic construct
  source 1..20: mol_type = other RNA
gattgactttgcacacagca

SEQ ID NO: 3643 - RNA, 20 nt, synthetic construct
  source 1..20: mol_type = other RNA
tgattgactttgcacacagc

SEQ ID NO: 3644 - RNA, 20 nt, synthetic construct
  source 1..20: mol_type = other RNA
atgattgactttgcacacag

SEQ ID NO: 3645 - RNA, 20 nt, synthetic construct
  source 1..20: mol_type = other RNA
cctgaagatgggcacgcggc

SEQ ID NO: 3646 - RNA, 20 nt, synthetic construct
  source 1..20: mol_type = other RNA
ggacctgaagatgggcacgc

SEQ ID NO: 3647 - RNA, 20 nt, synthetic construct
  source 1..20: mol_type = other RNA
tgaagatgggcacgcggcag

SEQ ID NO: 3648 - RNA, 20 nt, synthetic construct
  source 1..20: mol_type = other RNA
ctgaagatgggcacgcggca

SEQ ID NO: 3649 - RNA, 20 nt, synthetic construct
  source 1..20: mol_type = other RNA
acctgaagatgggcacgcgg

SEQ ID NO: 3650 - RNA, 20 nt, synthetic construct
  source 1..20: mol_type = other RNA
gacctgaagatgggcacgcg

SEQ ID NO: 3651 - RNA, 20 nt, synthetic construct
  source 1..20: mol_type = other RNA
tgcaagcccctcatctcccg

SEQ ID NO: 3652 - RNA, 20 nt, synthetic construct
  source 1..20: mol_type = other RNA
gtgcaagcccctcatctccc

SEQ ID NO: 3653 - RNA, 20 nt, synthetic construct
  source 1..20: mol_type = other RNA
tgtgcaagcccctcatctcc

SEQ ID NO: 3654 - RNA, 20 nt, synthetic construct
  source 1..20: mol_type = other RNA
gcaagcccctcatctcccgg

SEQ ID NO: 3655 - RNA, 20 nt, synthetic construct
  source 1..20: mol_type = other RNA
gtgtgcaagcccctcatctc

SEQ ID NO: 3656 - RNA, 20 nt, synthetic construct
  source 1..20: mol_type = other RNA
tgtgtgcaagcccctcatct

SEQ ID NO: 3657 - RNA, 20 nt, synthetic construct
  source 1..20: mol_type = other RNA
tcgactttgcacacaccacc

SEQ ID NO: 3658 - RNA, 20 nt, synthetic construct
  source 1..20: mol_type = other RNA
atcgactttgcacacaccac

SEQ ID NO: 3659 - RNA, 20 nt, synthetic construct
  source 1..20: mol_type = other RNA
gatcgactttgcacacacca

SEQ ID NO: 3660 - RNA, 20 nt, synthetic construct
  source 1..20: mol_type = other RNA
tgatcgactttgcacacacc

SEQ ID NO: 3661 - RNA, 20 nt, synthetic construct
  source 1..20: mol_type = other RNA
atgatcgactttgcacacac

SEQ ID NO: 3662 - RNA, 20 nt, synthetic construct
  source 1..20: mol_type = other RNA
tcaagatgggcacacgacaa

SEQ ID NO: 3663 - RNA, 20 nt, synthetic construct
  source 1..20: mol_type = other RNA
ctcaagatgggcacacgaca

SEQ ID NO: 3664 - RNA, 20 nt, synthetic construct
  source 1..20: mol_type = other RNA
cctcaagatgggcacacgac

SEQ ID NO: 3665 - RNA, 20 nt, synthetic construct
  source 1..20: mol_type = other RNA
acctcaagatgggcacacga

SEQ ID NO: 3666 - RNA, 20 nt, synthetic construct
  source 1..20: mol_type = other RNA
gacctcaagatgggcacacg

SEQ ID NO: 3667 - RNA, 20 nt, synthetic construct
  source 1..20: mol_type = other RNA
tgacctcaagatgggcacac

SEQ ID NO: 3668 - RNA, 20 nt, synthetic construct
  source 1..20: mol_type = other RNA
tgcaagcccctggtcccaag

SEQ ID NO: 3669 - RNA, 20 nt, synthetic construct
  source 1..20: mol_type = other RNA
gtgcaagcccctggtcccaa

SEQ ID NO: 3670 - RNA, 20 nt, synthetic construct
  source 1..20: mol_type = other RNA
tgtgcaagcccctggtccca

SEQ ID NO: 3671 - RNA, 20 nt, synthetic construct
  source 1..20: mol_type = other RNA
gcaagcccctggtcccaagg

SEQ ID NO: 3672 - RNA, 20 nt, synthetic construct
  source 1..20: mol_type = other RNA
ctgtgcaagcccctggtccc

SEQ ID NO: 3673 - RNA, 20 nt, synthetic construct
  source 1..20: mol_type = other RNA
cctgtgcaagcccctggtcc

SEQ ID NO: 3674 - RNA, 20 nt, synthetic construct
  source 1..20: mol_type = other RNA
ttgactttgctcataccaca

SEQ ID NO: 3675 - RNA, 20 nt, synthetic construct
  source 1..20: mol_type = other RNA
attgactttgctcataccac

SEQ ID NO: 3676 - RNA, 20 nt, synthetic construct
  source 1..20: mol_type = other RNA
gattgactttgctcatacca

SEQ ID NO: 3677 - RNA, 20 nt, synthetic construct
  source 1..20: mol_type = other RNA
tgattgactttgctcatacc

SEQ ID NO: 3678 - RNA, 20 nt, synthetic construct
  source 1..20: mol_type = other RNA
atgattgactttgctcatac

SEQ ID NO: 3679 - RNA, 20 nt, synthetic construct
  source 1..20: mol_type = other RNA
tctgaagatggggacccggc

SEQ ID NO: 3680 - RNA, 20 nt, synthetic construct
  source 1..20: mol_type = other RNA
ggatctgaagatggggaccc

SEQ ID NO: 3681 - RNA, 20 nt, synthetic construct
  source 1..20: mol_type = other RNA
tgaagatggggacccggcag

SEQ ID NO: 3682 - RNA, 20 nt, synthetic construct
  source 1..20: mol_type = other RNA
ctgaagatggggacccggca

SEQ ID NO: 3683 - RNA, 20 nt, synthetic construct
  source 1..20: mol_type = other RNA
atctgaagatggggacccgg

SEQ ID NO: 3684 - RNA, 20 nt, synthetic construct
  source 1..20: mol_type = other RNA
gatctgaagatggggacccg

SEQ ID NO: 3685 - RNA, 20 nt, synthetic construct
  source 1..20: mol_type = other RNA
tgcaagcccctcgtctcccg

SEQ ID NO: 3686 - RNA, 20 nt, synthetic construct
  source 1..20: mol_type = other RNA
gtgcaagcccctcgtctccc

SEQ ID NO: 3687 - RNA, 20 nt, synthetic construct
  source 1..20: mol_type = other RNA
tgtgcaagcccctcgtctcc

SEQ ID NO: 3688 - RNA, 20 nt, synthetic construct
  source 1..20: mol_type = other RNA
gcaagcccctcgtctcccgg

SEQ ID NO: 3689 - RNA, 20 nt, synthetic construct
  source 1..20: mol_type = other RNA
gtgtgcaagcccctcgtctc

SEQ ID NO: 3690 - RNA, 20 nt, synthetic construct
  source 1..20: mol_type = other RNA
ggtgtgcaagcccctcgtct

SEQ ID NO: 3691 - RNA, 20 nt, synthetic construct
  source 1..20: mol_type = other RNA
gatgtaaagatagggcaaaa

SEQ ID NO: 3692 - RNA, 20 nt, synthetic construct
  source 1..20: mol_type = other RNA
ggatgtaaagatagggcaaa

SEQ ID NO: 3693 - RNA, 20 nt, synthetic construct
  source 1..20: mol_type = other RNA
gaaacagttacaaccacctc

SEQ ID NO: 3694 - RNA, 20 nt, synthetic construct
  source 1..20: mol_type = other RNA
tgaaacagttacaaccacct

SEQ ID NO: 3695 - RNA, 20 nt, synthetic construct
  source 1..20: mol_type = other RNA
ttgaaacagttacaaccacc

SEQ ID NO: 3696 - RNA, 20 nt, synthetic construct
  source 1..20: mol_type = other RNA
tttgaaacagttacaaccac

SEQ ID NO: 3697 - RNA, 20 nt, synthetic construct
  source 1..20: mol_type = other RNA
tggaccttgacctcaagccc

SEQ ID NO: 3698 - RNA, 20 nt, synthetic construct
  source 1..20: mol_type = other RNA
ctggaccttgacctcaagcc

SEQ ID NO: 3699 - RNA, 20 nt, synthetic construct
  source 1..20: mol_type = other RNA
gctggaccttgacctcaagc

SEQ ID NO: 3700 - RNA, 20 nt, synthetic construct
  source 1..20: mol_type = other RNA
tgctggaccttgacctcaag

SEQ ID NO: 3701 - RNA, 20 nt, synthetic construct
  source 1..20: mol_type = other RNA
gtgctggaccttgacctcaa

SEQ ID NO: 3702 - RNA, 20 nt, synthetic construct
  source 1..20: mol_type = other RNA
aaggactgctccatcatgat

SEQ ID NO: 3703 - RNA, 20 nt, synthetic construct
  source 1..20: mol_type = other RNA
aggactgctccatcatgatt

SEQ ID NO: 3704 - RNA, 20 nt, synthetic construct
  source 1..20: mol_type = other RNA
caaggactgctccatcatga

SEQ ID NO: 3705 - RNA, 20 nt, synthetic construct
  source 1..20: mol_type = other RNA
ccaaggactgctccatcatg

SEQ ID NO: 3706 - RNA, 20 nt, synthetic construct
  source 1..20: mol_type = other RNA
gccaaggactgctccatcat

SEQ ID NO: 3707 - RNA, 20 nt, synthetic construct
  source 1..20: mol_type = other RNA
attaaggtgacctgtcgagg

SEQ ID NO: 3708 - RNA, 20 nt, synthetic construct
  source 1..20: mol_type = other RNA
gattaaggtgacctgtcgag

SEQ ID NO: 3709 - RNA, 20 nt, synthetic construct
  source 1..20: mol_type = other RNA
agattaaggtgacctgtcga

SEQ ID NO: 3710 - RNA, 20 nt, synthetic construct
  source 1..20: mol_type = other RNA
gagattaaggtgacctgtcg

SEQ ID NO: 3711 - RNA, 20 nt, synthetic construct
  source 1..20: mol_type = other RNA
ttaaggtgacctgtcgaggg

SEQ ID NO: 3712 - RNA, 20 nt, synthetic construct
  source 1..20: mol_type = other RNA
agagattaaggtgacctgtc

SEQ ID NO: 3713 - RNA, 20 nt, synthetic construct
  source 1..20: mol_type = other RNA
gggagactttggcctggccc

SEQ ID NO: 3714 - RNA, 20 nt, synthetic construct
  source 1..20: mol_type = other RNA
tgggagactttggcctggcc

SEQ ID NO: 3715 - RNA, 20 nt, synthetic construct
  source 1..20: mol_type = other RNA
gagactttggcctggcccgg

SEQ ID NO: 3716 - RNA, 20 nt, synthetic construct
  source 1..20: mol_type = other RNA
ggagactttggcctggcccg

SEQ ID NO: 3717 - RNA, 20 nt, synthetic construct
  source 1..20: mol_type = other RNA
ctgggagactttggcctggc

SEQ ID NO: 3718 - RNA, 20 nt, synthetic construct
  source 1..20: mol_type = other RNA
gagacatcaagaggtgagga

SEQ ID NO: 3719 - RNA, 20 nt, synthetic construct
  source 1..20: mol_type = other RNA
ggagacatcaagaggtgagg

SEQ ID NO: 3720 - RNA, 20 nt, synthetic construct
  source 1..20: mol_type = other RNA
atggagacatcaagaggtga

SEQ ID NO: 3721 - RNA, 20 nt, synthetic construct
  source 1..20: mol_type = other RNA
catggagacatcaagaggtg

SEQ ID NO: 3722 - RNA, 20 nt, synthetic construct
  source 1..20: mol_type = other RNA
tggagacatcaagaggtgag

SEQ ID NO: 3723 - RNA, 20 nt, synthetic construct
  source 1..20: mol_type = other RNA
ccaacgtccttctggatgag

SEQ ID NO: 3724 - RNA, 20 nt, synthetic construct
  source 1..20: mol_type = other RNA
ttccaacgtccttctggatg

SEQ ID NO: 3725 - RNA, 20 nt, synthetic construct
  source 1..20: mol_type = other RNA
agttccaacgtccttctgga

SEQ ID NO: 3726 - RNA, 20 nt, synthetic construct
  source 1..20: mol_type = other RNA
tccaacgtccttctggatga

SEQ ID NO: 3727 - RNA, 20 nt, synthetic construct
  source 1..20: mol_type = other RNA
gttccaacgtccttctggat

SEQ ID NO: 3728 - RNA, 20 nt, synthetic construct
  source 1..20: mol_type = other RNA
aagttccaacgtccttctgg

SEQ ID NO: 3729 - RNA, 20 nt, synthetic construct
  source 1..20: mol_type = other RNA
tgaagaggctgaaggaggtg

SEQ ID NO: 3730 - RNA, 20 nt, synthetic construct
  source 1..20: mol_type = other RNA
tgtgaagaggctgaaggagg

SEQ ID NO: 3731 - RNA, 20 nt, synthetic construct
  source 1..20: mol_type = other RNA
gctgtgaagaggctgaagga

SEQ ID NO: 3732 - RNA, 20 nt, synthetic construct
  source 1..20: mol_type = other RNA
tgctgtgaagaggctgaagg

SEQ ID NO: 3733 - RNA, 20 nt, synthetic construct
  source 1..20: mol_type = other RNA
gtgaagaggctgaaggaggt

SEQ ID NO: 3734 - RNA, 20 nt, synthetic construct
  source 1..20: mol_type = other RNA
ctgtgaagaggctgaaggag

SEQ ID NO: 3735 - RNA, 20 nt, synthetic construct
  source 1..20: mol_type = other RNA
cagctctaatgtcttgctgg

SEQ ID NO: 3736 - RNA, 20 nt, synthetic construct
  source 1..20: mol_type = other RNA
agctctaatgtcttgctgga

SEQ ID NO: 3737 - RNA, 20 nt, synthetic construct
  source 1..20: mol_type = other RNA
gctctaatgtcttgctggac

SEQ ID NO: 3738 - RNA, 20 nt, synthetic construct
  source 1..20: mol_type = other RNA
ctctaatgtcttgctggacc

SEQ ID NO: 3739 - RNA, 20 nt, synthetic construct
  source 1..20: mol_type = other RNA
tctaatgtcttgctggacca

SEQ ID NO: 3740 - RNA, 20 nt, synthetic construct
  source 1..20: mol_type = other RNA
ctaatgtcttgctggaccaa

SEQ ID NO: 3741 - RNA, 20 nt, synthetic construct
  source 1..20: mol_type = other RNA
cgtcttcaagaagctcagag

SEQ ID NO: 3742 - RNA, 20 nt, synthetic construct
  source 1..20: mol_type = other RNA
gtcttcaagaagctcagaga

SEQ ID NO: 3743 - RNA, 20 nt, synthetic construct
  source 1..20: mol_type = other RNA
cttcaagaagctcagagagg

SEQ ID NO: 3744 - RNA, 20 nt, synthetic construct
  source 1..20: mol_type = other RNA
tcaagaagctcagagaggtg

SEQ ID NO: 3745 - RNA, 20 nt, synthetic construct
  source 1..20: mol_type = other RNA
tcttcaagaagctcagagag

SEQ ID NO: 3746 - RNA, 20 nt, synthetic construct
  source 1..20: mol_type = other RNA
ttcaagaagctcagagaggt

SEQ ID NO: 3747 - RNA, 20 nt, synthetic construct
  source 1..20: mol_type = other RNA
tgctgtcaaattatttaaac

SEQ ID NO: 3748 - RNA, 20 nt, synthetic construct
  source 1..20: mol_type = other RNA
gctgtcaaattatttaaaca

SEQ ID NO: 3749 - RNA, 20 nt, synthetic construct
  source 1..20: mol_type = other RNA
tcaaattatttaaacaggta

SEQ ID NO: 3750 - RNA, 20 nt, synthetic construct
  source 1..20: mol_type = other RNA
caaattatttaaacaggtat

SEQ ID NO: 3751 - RNA, 20 nt, synthetic construct
  source 1..20: mol_type = other RNA
ctgtcaaattatttaaacag

SEQ ID NO: 3752 - RNA, 20 nt, synthetic construct
  source 1..20: mol_type = other RNA
tgtcaaattatttaaacagg

SEQ ID NO: 3753 - RNA, 20 nt, synthetic construct
  source 1..20: mol_type = other RNA
gtcaaattatttaaacaggt

SEQ ID NO: 3754 - RNA, 20 nt, synthetic construct
  source 1..20: mol_type = other RNA
tatctgactttggccttgca

SEQ ID NO: 3755 - RNA, 20 nt, synthetic construct
  source 1..20: mol_type = other RNA
atctgactttggccttgcac

SEQ ID NO: 3756 - RNA, 20 nt, synthetic construct
  source 1..20: mol_type = other RNA
tctgactttggccttgcacg

SEQ ID NO: 3757 - RNA, 20 nt, synthetic construct
  source 1..20: mol_type = other RNA
atatctgactttggccttgc

SEQ ID NO: 3758 - RNA, 20 nt, synthetic construct
  source 1..20: mol_type = other RNA
ctgactttggccttgcacgg

SEQ ID NO: 3759 - RNA, 20 nt, synthetic construct
  source 1..20: mol_type = other RNA
tagagatattaaaaggtaaa

SEQ ID NO: 3760 - RNA, 20 nt, synthetic construct
  source 1..20: mol_type = other RNA
catagagatattaaaaggta

SEQ ID NO: 3761 - RNA, 20 nt, synthetic construct
  source 1..20: mol_type = other RNA
atagagatattaaaaggtaa

SEQ ID NO: 3762 - RNA, 20 nt, synthetic construct
  source 1..20: mol_type = other RNA
agagatattaaaaggtaaat

SEQ ID NO: 3763 - RNA, 20 nt, synthetic construct
  source 1..20: mol_type = other RNA
gagatattaaaaggtaaatg

SEQ ID NO: 3764 - RNA, 20 nt, synthetic construct
  source 1..20: mol_type = other RNA
agtgcaaatatcttactgga

SEQ ID NO: 3765 - RNA, 20 nt, synthetic construct
  source 1..20: mol_type = other RNA
gcaaatatcttactggatga

SEQ ID NO: 3766 - RNA, 20 nt, synthetic construct
  source 1..20: mol_type = other RNA
cagtgcaaatatcttactgg

SEQ ID NO: 3767 - RNA, 20 nt, synthetic construct
  source 1..20: mol_type = other RNA
gtgcaaatatcttactggat

SEQ ID NO: 3768 - RNA, 20 nt, synthetic construct
  source 1..20: mol_type = other RNA
tgcaaatatcttactggatg

SEQ ID NO: 3769 - RNA, 20 nt, synthetic construct
  source 1..20: mol_type = other RNA
caaatatcttactggatgaa

SEQ ID NO: 3770 - RNA, 20 nt, synthetic construct
  source 1..20: mol_type = other RNA
gcagtgaagaagcttgcagc

SEQ ID NO: 3771 - RNA, 20 nt, synthetic construct
  source 1..20: mol_type = other RNA
tgaagaagcttgcagcagta

SEQ ID NO: 3772 - RNA, 20 nt, synthetic construct
  source 1..20: mol_type = other RNA
ggcagtgaagaagcttgcag

SEQ ID NO: 3773 - RNA, 20 nt, synthetic construct
  source 1..20: mol_type = other RNA
cagtgaagaagcttgcagca

SEQ ID NO: 3774 - RNA, 20 nt, synthetic construct
  source 1..20: mol_type = other RNA
agtgaagaagcttgcagcag

SEQ ID NO: 3775 - RNA, 20 nt, synthetic construct
  source 1..20: mol_type = other RNA
gtgaagaagcttgcagcagt

SEQ ID NO: 3776 - RNA, 20 nt, synthetic construct
  source 1..20: mol_type = other RNA
tgtctgactttgggatgaca

SEQ ID NO: 3777 - RNA, 20 nt, synthetic construct
  source 1..20: mol_type = other RNA
gtctgactttgggatgacaa

SEQ ID NO: 3778 - RNA, 20 nt, synthetic construct
  source 1..20: mol_type = other RNA
gtgtctgactttgggatgac

SEQ ID NO: 3779 - RNA, 20 nt, synthetic construct
  source 1..20: mol_type = other RNA
tctgactttgggatgacaag

SEQ ID NO: 3780 - RNA, 20 nt, synthetic construct
  source 1..20: mol_type = other RNA
ctgactttgggatgacaagg

SEQ ID NO: 3781 - RNA, 20 nt, synthetic construct
  source 1..20: mol_type = other RNA
acagagacttggtatgagca

SEQ ID NO: 3782 - RNA, 20 nt, synthetic construct
  source 1..20: mol_type = other RNA
gagacttggtatgagcatgc

SEQ ID NO: 3783 - RNA, 20 nt, synthetic construct
  source 1..20: mol_type = other RNA
cacagagacttggtatgagc

SEQ ID NO: 3784 - RNA, 20 nt, synthetic construct
  source 1..20: mol_type = other RNA
cagagacttggtatgagcat

SEQ ID NO: 3785 - RNA, 20 nt, synthetic construct
  source 1..20: mol_type = other RNA
agagacttggtatgagcatg

SEQ ID NO: 3786 - RNA, 20 nt, synthetic construct
  source 1..20: mol_type = other RNA
gccagaaattgtttggtggg

SEQ ID NO: 3787 - RNA, 20 nt, synthetic construct
  source 1..20: mol_type = other RNA
tgccagaaattgtttggtgg

SEQ ID NO: 3788 - RNA, 20 nt, synthetic construct
  source 1..20: mol_type = other RNA
ccagaaattgtttggtggga

SEQ ID NO: 3789 - RNA, 20 nt, synthetic construct
  source 1..20: mol_type = other RNA
cagaaattgtttggtgggag

SEQ ID NO: 3790 - RNA, 20 nt, synthetic construct
  source 1..20: mol_type = other RNA
agaaattgtttggtgggaga

SEQ ID NO: 3791 - RNA, 20 nt, synthetic construct
  source 1..20: mol_type = other RNA
gaaattgtttggtgggagaa

SEQ ID NO: 3792 - RNA, 20 nt, synthetic construct
  source 1..20: mol_type = other RNA
gctatcaaaaccattcggga

SEQ ID NO: 3793 - RNA, 20 nt, synthetic construct
  source 1..20: mol_type = other RNA
ctatcaaaaccattcgggaa

SEQ ID NO: 3794 - RNA, 20 nt, synthetic construct
  source 1..20: mol_type = other RNA
tatcaaaaccattcgggaag

SEQ ID NO: 3795 - RNA, 20 nt, synthetic construct
  source 1..20: mol_type = other RNA
atcaaaaccattcgggaagg

SEQ ID NO: 3796 - RNA, 20 nt, synthetic construct
  source 1..20: mol_type = other RNA
ggctatcaaaaccattcggg

SEQ ID NO: 3797 - RNA, 20 nt, synthetic construct
  source 1..20: mol_type = other RNA
tcaaaaccattcgggaaggg

SEQ ID NO: 3798 - RNA, 20 nt, synthetic construct
  source 1..20: mol_type = other RNA
caaaaccattcgggaagggg

SEQ ID NO: 3799 - RNA, 20 nt, synthetic construct
  source 1..20: mol_type = other RNA
catcgacttcggcaagacca

SEQ ID NO: 3800 - RNA, 20 nt, synthetic construct
  source 1..20: mol_type = other RNA
ctcatcgacttcggcaagac

SEQ ID NO: 3801 - RNA, 20 nt, synthetic construct
  source 1..20: mol_type = other RNA
tcatcgacttcggcaagacc

SEQ ID NO: 3802 - RNA, 20 nt, synthetic construct
  source 1..20: mol_type = other RNA
atcgacttcggcaagaccac

SEQ ID NO: 3803 - RNA, 20 nt, synthetic construct
  source 1..20: mol_type = other RNA
tcgacttcggcaagaccacg

SEQ ID NO: 3804 - RNA, 20 nt, synthetic construct
  source 1..20: mol_type = other RNA
cgactgcaaaatgggcgtca

SEQ ID NO: 3805 - RNA, 20 nt, synthetic construct
  source 1..20: mol_type = other RNA
tgcaaaatgggcgtcaggta

SEQ ID NO: 3806 - RNA, 20 nt, synthetic construct
  source 1..20: mol_type = other RNA
caaaatgggcgtcaggtatg

SEQ ID NO: 3807 - RNA, 20 nt, synthetic construct
  source 1..20: mol_type = other RNA
gactgcaaaatgggcgtcag

SEQ ID NO: 3808 - RNA, 20 nt, synthetic construct
  source 1..20: mol_type = other RNA
actgcaaaatgggcgtcagg

SEQ ID NO: 3809 - RNA, 20 nt, synthetic construct
  source 1..20: mol_type = other RNA
ctgcaaaatgggcgtcaggt

SEQ ID NO: 3810 - RNA, 20 nt, synthetic construct
  source 1..20: mol_type = other RNA
gcaaaatgggcgtcaggtat

SEQ ID NO: 3811 - RNA, 20 nt, synthetic construct
  source 1..20: mol_type = other RNA
gatcctgaagcgctgctcgg

SEQ ID NO: 3812 - RNA, 20 nt, synthetic construct
  source 1..20: mol_type = other RNA
cctgaagcgctgctcggagc

SEQ ID NO: 3813 - RNA, 20 nt, synthetic construct
  source 1..20: mol_type = other RNA
ctgaagcgctgctcggagcc

SEQ ID NO: 3814 - RNA, 20 nt, synthetic construct
  source 1..20: mol_type = other RNA
atcctgaagcgctgctcgga

SEQ ID NO: 3815 - RNA, 20 nt, synthetic construct
  source 1..20: mol_type = other RNA
tcctgaagcgctgctcggag

SEQ ID NO: 3816 - RNA, 20 nt, synthetic construct
  source 1..20: mol_type = other RNA
tgaagcgctgctcggagccg

SEQ ID NO: 3817 - RNA, 20 nt, synthetic construct
  source 1..20: mol_type = other RNA
gatcgactttgggaaaacca

SEQ ID NO: 3818 - RNA, 20 nt, synthetic construct
  source 1..20: mol_type = other RNA
tcgactttgggaaaaccacg

SEQ ID NO: 3819 - RNA, 20 nt, synthetic construct
  source 1..20: mol_type = other RNA
atcgactttgggaaaaccac

SEQ ID NO: 3820 - RNA, 20 nt, synthetic construct
  source 1..20: mol_type = other RNA
tgatcgactttgggaaaacc

SEQ ID NO: 3821 - RNA, 20 nt, synthetic construct
  source 1..20: mol_type = other RNA
atgatcgactttgggaaaac

SEQ ID NO: 3822 - RNA, 20 nt, synthetic construct
  source 1..20: mol_type = other RNA
tgcaagatgggaatcaggtg

SEQ ID NO: 3823 - RNA, 20 nt, synthetic construct
  source 1..20: mol_type = other RNA
actgcaagatgggaatcagg

SEQ ID NO: 3824 - RNA, 20 nt, synthetic construct
  source 1..20: mol_type = other RNA
ggactgcaagatgggaatca

SEQ ID NO: 3825 - RNA, 20 nt, synthetic construct
  source 1..20: mol_type = other RNA
gcaagatgggaatcaggtga

SEQ ID NO: 3826 - RNA, 20 nt, synthetic construct
  source 1..20: mol_type = other RNA
ctgcaagatgggaatcaggt

SEQ ID NO: 3827 - RNA, 20 nt, synthetic construct
  source 1..20: mol_type = other RNA
gactgcaagatgggaatcag

SEQ ID NO: 3828 - RNA, 20 nt, synthetic construct
  source 1..20: mol_type = other RNA
ctgaagaagcactgtgagtc

SEQ ID NO: 3829 - RNA, 20 nt, synthetic construct
  source 1..20: mol_type = other RNA
gatcctgaagaagcactgtg

SEQ ID NO: 3830 - RNA, 20 nt, synthetic construct
  source 1..20: mol_type = other RNA
tgaagaagcactgtgagtca

SEQ ID NO: 3831 - RNA, 20 nt, synthetic construct
  source 1..20: mol_type = other RNA
cctgaagaagcactgtgagt

SEQ ID NO: 3832 - RNA, 20 nt, synthetic construct
  source 1..20: mol_type = other RNA
tcctgaagaagcactgtgag

SEQ ID NO: 3833 - RNA, 20 nt, synthetic construct
  source 1..20: mol_type = other RNA
atcctgaagaagcactgtga

SEQ ID NO: 3834 - RNA, 20 nt, synthetic construct
  source 1..20: mol_type = other RNA
atgatagacttcggcaagac

SEQ ID NO: 3835 - RNA, 20 nt, synthetic construct
  source 1..20: mol_type = other RNA
gatagacttcggcaagacgg

SEQ ID NO: 3836 - RNA, 20 nt, synthetic construct
  source 1..20: mol_type = other RNA
atagacttcggcaagacggt

SEQ ID NO: 3837 - RNA, 20 nt, synthetic construct
  source 1..20: mol_type = other RNA
tgatagacttcggcaagacg

SEQ ID NO: 3838 - RNA, 20 nt, synthetic construct
  source 1..20: mol_type = other RNA
tagacttcggcaagacggtg

SEQ ID NO: 3839 - RNA, 20 nt, synthetic construct
  source 1..20: mol_type = other RNA
ggactgcaagatgggcagca

SEQ ID NO: 3840 - RNA, 20 nt, synthetic construct
  source 1..20: mol_type = other RNA
actgcaagatgggcagcagg

SEQ ID NO: 3841 - RNA, 20 nt, synthetic construct
  source 1..20: mol_type = other RNA
ctgcaagatgggcagcaggt

SEQ ID NO: 3842 - RNA, 20 nt, synthetic construct
  source 1..20: mol_type = other RNA
tgcaagatgggcagcaggtg

SEQ ID NO: 3843 - RNA, 20 nt, synthetic construct
  source 1..20: mol_type = other RNA
gcaagatgggcagcaggtgg

SEQ ID NO: 3844 - RNA, 20 nt, synthetic construct
  source 1..20: mol_type = other RNA
gactgcaagatgggcagcag

SEQ ID NO: 3845 - RNA, 20 nt, synthetic construct
  source 1..20: mol_type = other RNA
gattctgaaacgtttctgtc

SEQ ID NO: 3846 - RNA, 20 nt, synthetic construct
  source 1..20: mol_type = other RNA
ttctgaaacgtttctgtcag

SEQ ID NO: 3847 - RNA, 20 nt, synthetic construct
  source 1..20: mol_type = other RNA
ctgaaacgtttctgtcagtg

SEQ ID NO: 3848 - RNA, 20 nt, synthetic construct
  source 1..20: mol_type = other RNA
gaaacgtttctgtcagtgtg

SEQ ID NO: 3849 - RNA, 20 nt, synthetic construct
  source 1..20: mol_type = other RNA
attctgaaacgtttctgtca

SEQ ID NO: 3850 - RNA, 20 nt, synthetic construct
  source 1..20: mol_type = other RNA
tctgaaacgtttctgtcagt

SEQ ID NO: 3851 - RNA, 20 nt, synthetic construct
  source 1..20: mol_type = other RNA
tgaaacgtttctgtcagtgt

SEQ ID NO: 3852 - RNA, 20 nt, synthetic construct
  source 1..20: mol_type = other RNA
ggagacttcggtttaaccaa

SEQ ID NO: 3853 - RNA, 20 nt, synthetic construct
  source 1..20: mol_type = other RNA
gagacttcggtttaaccaaa

SEQ ID NO: 3854 - RNA, 20 nt, synthetic construct
  source 1..20: mol_type = other RNA
tggagacttcggtttaacca

SEQ ID NO: 3855 - RNA, 20 nt, synthetic construct
  source 1..20: mol_type = other RNA
ttggagacttcggtttaacc

SEQ ID NO: 3856 - RNA, 20 nt, synthetic construct
  source 1..20: mol_type = other RNA
attggagacttcggtttaac

SEQ ID NO: 3857 - RNA, 20 nt, synthetic construct
  source 1..20: mol_type = other RNA
gtgaccccggcatccccatt

SEQ ID NO: 3858 - RNA, 20 nt, synthetic construct
  source 1..20: mol_type = other RNA
agtgaccccggcatccccat

SEQ ID NO: 3859 - RNA, 20 nt, synthetic construct
  source 1..20: mol_type = other RNA
cagtgaccccggcatcccca

SEQ ID NO: 3860 - RNA, 20 nt, synthetic construct
  source 1..20: mol_type = other RNA
tcagtgaccccggcatcccc

SEQ ID NO: 3861 - RNA, 20 nt, synthetic construct
  source 1..20: mol_type = other RNA
ctcagtgaccccggcatccc

SEQ ID NO: 3862 - RNA, 20 nt, synthetic construct
  source 1..20: mol_type = other RNA
cgggacttggcagcaagaaa

SEQ ID NO: 3863 - RNA, 20 nt, synthetic construct
  source 1..20: mol_type = other RNA
gggacttggcagcaagaaat

SEQ ID NO: 3864 - RNA, 20 nt, synthetic construct
  source 1..20: mol_type = other RNA
ccgggacttggcagcaagaa

SEQ ID NO: 3865 - RNA, 20 nt, synthetic construct
  source 1..20: mol_type = other RNA
accgggacttggcagcaaga

SEQ ID NO: 3866 - RNA, 20 nt, synthetic construct
  source 1..20: mol_type = other RNA
caccgggacttggcagcaag

SEQ ID NO: 3867 - RNA, 20 nt, synthetic construct
  source 1..20: mol_type = other RNA
agaaatgtccttgttgagag

SEQ ID NO: 3868 - RNA, 20 nt, synthetic construct
  source 1..20: mol_type = other RNA
caagaaatgtccttgttgag

SEQ ID NO: 3869 - RNA, 20 nt, synthetic construct
  source 1..20: mol_type = other RNA
agcaagaaatgtccttgttg

SEQ ID NO: 3870 - RNA, 20 nt, synthetic construct
  source 1..20: mol_type = other RNA
gaaatgtccttgttgagagt

SEQ ID NO: 3871 - RNA, 20 nt, synthetic construct
  source 1..20: mol_type = other RNA
aagaaatgtccttgttgaga

SEQ ID NO: 3872 - RNA, 20 nt, synthetic construct
  source 1..20: mol_type = other RNA
gcaagaaatgtccttgttga

SEQ ID NO: 3873 - RNA, 20 nt, synthetic construct
  source 1..20: mol_type = other RNA
aaaacctcctcctggcccgt

SEQ ID NO: 3874 - RNA, 20 nt, synthetic construct
  source 1..20: mol_type = other RNA
ttaaatctctgaagcctgag

SEQ ID NO: 3875 - RNA, 20 nt, synthetic construct
  source 1..20: mol_type = other RNA
tgttaaatctctgaagcctg

SEQ ID NO: 3876 - RNA, 20 nt, synthetic construct
  source 1..20: mol_type = other RNA
gctgttaaatctctgaagcc

SEQ ID NO: 3877 - RNA, 20 nt, synthetic construct
  source 1..20: mol_type = other RNA
taaatctctgaagcctgaga

SEQ ID NO: 3878 - RNA, 20 nt, synthetic construct
  source 1..20: mol_type = other RNA
gttaaatctctgaagcctga

SEQ ID NO: 3879 - RNA, 20 nt, synthetic construct
  source 1..20: mol_type = other RNA
ctgttaaatctctgaagcct

SEQ ID NO: 3880 - RNA, 20 nt, synthetic construct
  source 1..20: mol_type = other RNA
ggctgttaaatctctgaagc

SEQ ID NO: 3881 - RNA, 20 nt, synthetic construct
  source 1..20: mol_type = other RNA
tcctcaaagtcttagacccc

SEQ ID NO: 3882 - RNA, 20 nt, synthetic construct
  source 1..20: mol_type = other RNA
caaagtcttagaccccagcc

SEQ ID NO: 3883 - RNA, 20 nt, synthetic construct
  source 1..20: mol_type = other RNA
tcaaagtcttagaccccagc

SEQ ID NO: 3884 - RNA, 20 nt, synthetic construct
  source 1..20: mol_type = other RNA
ctcaaagtcttagaccccag

SEQ ID NO: 3885 - RNA, 20 nt, synthetic construct
  source 1..20: mol_type = other RNA
cctcaaagtcttagacccca

SEQ ID NO: 3886 - RNA, 20 nt, synthetic construct
  source 1..20: mol_type = other RNA
atcctcaaagtcttagaccc

SEQ ID NO: 3887 - RNA, 20 nt, synthetic construct
  source 1..20: mol_type = other RNA
gatcctcaaagtcttagacc

SEQ ID NO: 3888 - RNA, 20 nt, synthetic construct
  source 1..20: mol_type = other RNA
cttagtgatcctggcattag

SEQ ID NO: 3889 - RNA, 20 nt, synthetic construct
  source 1..20: mol_type = other RNA
ttagtgatcctggcattagt

SEQ ID NO: 3890 - RNA, 20 nt, synthetic construct
  source 1..20: mol_type = other RNA
tagtgatcctggcattagta

SEQ ID NO: 3891 - RNA, 20 nt, synthetic construct
  source 1..20: mol_type = other RNA
agtgatcctggcattagtat

SEQ ID NO: 3892 - RNA, 20 nt, synthetic construct
  source 1..20: mol_type = other RNA
gtgatcctggcattagtatt

SEQ ID NO: 3893 - RNA, 20 nt, synthetic construct
  source 1..20: mol_type = other RNA
cacagggatctggcaacgag

SEQ ID NO: 3894 - RNA, 20 nt, synthetic construct
  source 1..20: mol_type = other RNA
acagggatctggcaacgaga

SEQ ID NO: 3895 - RNA, 20 nt, synthetic construct
  source 1..20: mol_type = other RNA
cagggatctggcaacgagaa

SEQ ID NO: 3896 - RNA, 20 nt, synthetic construct
  source 1..20: mol_type = other RNA
agggatctggcaacgagaaa

SEQ ID NO: 3897 - RNA, 20 nt, synthetic construct
  source 1..20: mol_type = other RNA
gggatctggcaacgagaaat

SEQ ID NO: 3898 - RNA, 20 nt, synthetic construct
  source 1..20: mol_type = other RNA
aaaatattctgcttatcaga

SEQ ID NO: 3899 - RNA, 20 nt, synthetic construct
  source 1..20: mol_type = other RNA
aacgagaaatatattggtgg

SEQ ID NO: 3900 - RNA, 20 nt, synthetic construct
  source 1..20: mol_type = other RNA
agaaatatattggtggagaa

SEQ ID NO: 3901 - RNA, 20 nt, synthetic construct
  source 1..20: mol_type = other RNA
acgagaaatatattggtgga

SEQ ID NO: 3902 - RNA, 20 nt, synthetic construct
  source 1..20: mol_type = other RNA
cgagaaatatattggtggag

SEQ ID NO: 3903 - RNA, 20 nt, synthetic construct
  source 1..20: mol_type = other RNA
gagaaatatattggtggaga

SEQ ID NO: 3904 - RNA, 20 nt, synthetic construct
  source 1..20: mol_type = other RNA
gaaatatattggtggagaac

SEQ ID NO: 3905 - RNA, 20 nt, synthetic construct
  source 1..20: mol_type = other RNA
tttaaaagttctggataaag

SEQ ID NO: 3906 - RNA, 20 nt, synthetic construct
  source 1..20: mol_type = other RNA
ttaaaagttctggataaagc

SEQ ID NO: 3907 - RNA, 20 nt, synthetic construct
  source 1..20: mol_type = other RNA
taaaagttctggataaagca

SEQ ID NO: 3908 - RNA, 20 nt, synthetic construct
  source 1..20: mol_type = other RNA
aaaagttctggataaagcac

SEQ ID NO: 3909 - RNA, 20 nt, synthetic construct
  source 1..20: mol_type = other RNA
cgctgacttcggcctagcta

SEQ ID NO: 3910 - RNA, 20 nt, synthetic construct
  source 1..20: mol_type = other RNA
ctgacttcggcctagctaag

SEQ ID NO: 3911 - RNA, 20 nt, synthetic construct
  source 1..20: mol_type = other RNA
gctgacttcggcctagctaa

SEQ ID NO: 3912 - RNA, 20 nt, synthetic construct
  source 1..20: mol_type = other RNA
tcgctgacttcggcctagct

SEQ ID NO: 3913 - RNA, 20 nt, synthetic construct
  source 1..20: mol_type = other RNA
atcgctgacttcggcctagc

SEQ ID NO: 3914 - RNA, 20 nt, synthetic construct
  source 1..20: mol_type = other RNA
agtgaccctggggtcagccc

SEQ ID NO: 3915 - RNA, 20 nt, synthetic construct
  source 1..20: mol_type = other RNA
gtgaccctggggtcagcccc

SEQ ID NO: 3916 - RNA, 20 nt, synthetic construct
  source 1..20: mol_type = other RNA
gagtgaccctggggtcagcc

SEQ ID NO: 3917 - RNA, 20 nt, synthetic construct
  source 1..20: mol_type = other RNA
tgagtgaccctggggtcagc

SEQ ID NO: 3918 - RNA, 20 nt, synthetic construct
  source 1..20: mol_type = other RNA
ctgagtgaccctggggtcag

SEQ ID NO: 3919 - RNA, 20 nt, synthetic construct
  source 1..20: mol_type = other RNA
gcgacctggccgcccgaaac

SEQ ID NO: 3920 - RNA, 20 nt, synthetic construct
  source 1..20: mol_type = other RNA
cgcgacctggccgcccgaaa

SEQ ID NO: 3921 - RNA, 20 nt, synthetic construct
  source 1..20: mol_type = other RNA
ccgcgacctggccgcccgaa

SEQ ID NO: 3922 - RNA, 20 nt, synthetic construct
  source 1..20: mol_type = other RNA
accgcgacctggccgcccga

SEQ ID NO: 3923 - RNA, 20 nt, synthetic construct
  source 1..20: mol_type = other RNA
cgaaacatcctcgtggagag

SEQ ID NO: 3924 - RNA, 20 nt, synthetic construct
  source 1..20: mol_type = other RNA
cccgaaacatcctcgtggag

SEQ ID NO: 3925 - RNA, 20 nt, synthetic construct
  source 1..20: mol_type = other RNA
cgcccgaaacatcctcgtgg

SEQ ID NO: 3926 - RNA, 20 nt, synthetic construct
  source 1..20: mol_type = other RNA
gaaacatcctcgtggagagc

SEQ ID NO: 3927 - RNA, 20 nt, synthetic construct
  source 1..20: mol_type = other RNA
ccgaaacatcctcgtggaga

SEQ ID NO: 3928 - RNA, 20 nt, synthetic construct
  source 1..20: mol_type = other RNA
gcccgaaacatcctcgtgga

SEQ ID NO: 3929 - RNA, 20 nt, synthetic construct
  source 1..20: mol_type = other RNA
gaaacagctgcagcacagcg

SEQ ID NO: 3930 - RNA, 20 nt, synthetic construct
  source 1..20: mol_type = other RNA
tgaaacagctgcagcacagc

SEQ ID NO: 3931 - RNA, 20 nt, synthetic construct
  source 1..20: mol_type = other RNA
gtgaaacagctgcagcacag

SEQ ID NO: 3932 - RNA, 20 nt, synthetic construct
  source 1..20: mol_type = other RNA
ccgtgaaacagctgcagcac

SEQ ID NO: 3933 - RNA, 20 nt, synthetic construct
  source 1..20: mol_type = other RNA
cgtgaaacagctgcagcaca

SEQ ID NO: 3934 - RNA, 20 nt, synthetic construct
  source 1..20: mol_type = other RNA
gccgtgaaacagctgcagca

SEQ ID NO: 3935 - RNA, 20 nt, synthetic construct
  source 1..20: mol_type = other RNA
ggccgtgaaacagctgcagc

SEQ ID NO: 3936 - RNA, 20 nt, synthetic construct
  source 1..20: mol_type = other RNA
gctgaaggtcatggatgcca

SEQ ID NO: 3937 - RNA, 20 nt, synthetic construct
  source 1..20: mol_type = other RNA
tgaaggtcatggatgccaag

SEQ ID NO: 3938 - RNA, 20 nt, synthetic construct
  source 1..20: mol_type = other RNA
ctgaaggtcatggatgccaa

SEQ ID NO: 3939 - RNA, 20 nt, synthetic construct
  source 1..20: mol_type = other RNA
tgctgaaggtcatggatgcc

SEQ ID NO: 3940 - RNA, 20 nt, synthetic construct
  source 1..20: mol_type = other RNA
ctgctgaaggtcatggatgc

SEQ ID NO: 3941 - RNA, 20 nt, synthetic construct
  source 1..20: mol_type = other RNA
gctgctgaaggtcatggatg

SEQ ID NO: 3942 - RNA, 20 nt, synthetic construct
  source 1..20: mol_type = other RNA
ctcattgacttggaggatgc

SEQ ID NO: 3943 - RNA, 20 nt, synthetic construct
  source 1..20: mol_type = other RNA
tcattgacttggaggatgct

SEQ ID NO: 3944 - RNA, 20 nt, synthetic construct
  source 1..20: mol_type = other RNA
cattgacttggaggatgctg

SEQ ID NO: 3945 - RNA, 20 nt, synthetic construct
  source 1..20: mol_type = other RNA
attgacttggaggatgctgt

SEQ ID NO: 3946 - RNA, 20 nt, synthetic construct
  source 1..20: mol_type = other RNA
ttgacttggaggatgctgtc

SEQ ID NO: 3947 - RNA, 20 nt, synthetic construct
  source 1..20: mol_type = other RNA
atttggacataaaggtaata

SEQ ID NO: 3948 - RNA, 20 nt, synthetic construct
  source 1..20: mol_type = other RNA
tggacataaaggtaataaga

SEQ ID NO: 3949 - RNA, 20 nt, synthetic construct
  source 1..20: mol_type = other RNA
catttggacataaaggtaat

SEQ ID NO: 3950 - RNA, 20 nt, synthetic construct
  source 1..20: mol_type = other RNA
tttggacataaaggtaataa

SEQ ID NO: 3951 - RNA, 20 nt, synthetic construct
  source 1..20: mol_type = other RNA
ttggacataaaggtaataag

SEQ ID NO: 3952 - RNA, 20 nt, synthetic construct
  source 1..20: mol_type = other RNA
aaaacctgctcattgaccta

SEQ ID NO: 3953 - RNA, 20 nt, synthetic construct
  source 1..20: mol_type = other RNA
gcctgaaaacctgctcattg

SEQ ID NO: 3954 - RNA, 20 nt, synthetic construct
  source 1..20: mol_type = other RNA
cctgaaaacctgctcattga

SEQ ID NO: 3955 - RNA, 20 nt, synthetic construct
  source 1..20: mol_type = other RNA
ctgaaaacctgctcattgac

SEQ ID NO: 3956 - RNA, 20 nt, synthetic construct
  source 1..20: mol_type = other RNA
tgaaaacctgctcattgacc

SEQ ID NO: 3957 - RNA, 20 nt, synthetic construct
  source 1..20: mol_type = other RNA
gaaaacctgctcattgacct

SEQ ID NO: 3958 - RNA, 20 nt, synthetic construct
  source 1..20: mol_type = other RNA
ggctgtgaaatttgttagca

SEQ ID NO: 3959 - RNA, 20 nt, synthetic construct
  source 1..20: mol_type = other RNA
gctgtgaaatttgttagcaa

SEQ ID NO: 3960 - RNA, 20 nt, synthetic construct
  source 1..20: mol_type = other RNA
ctgtgaaatttgttagcaaa

SEQ ID NO: 3961 - RNA, 20 nt, synthetic construct
  source 1..20: mol_type = other RNA
tgtgaaatttgttagcaaaa

SEQ ID NO: 3962 - RNA, 20 nt, synthetic construct
  source 1..20: mol_type = other RNA
tgtgactttggcttggcccg

SEQ ID NO: 3963 - RNA, 20 nt, synthetic construct
  source 1..20: mol_type = other RNA
ctgtgactttggcttggccc

SEQ ID NO: 3964 - RNA, 20 nt, synthetic construct
  source 1..20: mol_type = other RNA
tctgtgactttggcttggcc

SEQ ID NO: 3965 - RNA, 20 nt, synthetic construct
  source 1..20: mol_type = other RNA
gtgactttggcttggcccgg

SEQ ID NO: 3966 - RNA, 20 nt, synthetic construct
  source 1..20: mol_type = other RNA
atctgtgactttggcttggc

SEQ ID NO: 3967 - RNA, 20 nt, synthetic construct
  source 1..20: mol_type = other RNA
gggacctggcggcacgaaat

SEQ ID NO: 3968 - RNA, 20 nt, synthetic construct
  source 1..20: mol_type = other RNA
agggacctggcggcacgaaa

SEQ ID NO: 3969 - RNA, 20 nt, synthetic construct
  source 1..20: mol_type = other RNA
cagggacctggcggcacgaa

SEQ ID NO: 3970 - RNA, 20 nt, synthetic construct
  source 1..20: mol_type = other RNA
acagggacctggcggcacga

SEQ ID NO: 3971 - RNA, 20 nt, synthetic construct
  source 1..20: mol_type = other RNA
cacagggacctggcggcacg

SEQ ID NO: 3972 - RNA, 20 nt, synthetic construct
  source 1..20: mol_type = other RNA
acgaaatatcctcttatcgg

SEQ ID NO: 3973 - RNA, 20 nt, synthetic construct
  source 1..20: mol_type = other RNA
gcacgaaatatcctcttatc

SEQ ID NO: 3974 - RNA, 20 nt, synthetic construct
  source 1..20: mol_type = other RNA
ggcacgaaatatcctcttat

SEQ ID NO: 3975 - RNA, 20 nt, synthetic construct
  source 1..20: mol_type = other RNA
gaaatatcctcttatcggag

SEQ ID NO: 3976 - RNA, 20 nt, synthetic construct
  source 1..20: mol_type = other RNA
cgaaatatcctcttatcgga

SEQ ID NO: 3977 - RNA, 20 nt, synthetic construct
  source 1..20: mol_type = other RNA
cacgaaatatcctcttatcg

SEQ ID NO: 3978 - RNA, 20 nt, synthetic construct
  source 1..20: mol_type = other RNA
tcaaaatgttgaaaggtaaa

SEQ ID NO: 3979 - RNA, 20 nt, synthetic construct
  source 1..20: mol_type = other RNA
caaaatgttgaaaggtaaaa

SEQ ID NO: 3980 - RNA, 20 nt, synthetic construct
  source 1..20: mol_type = other RNA
gtcaaaatgttgaaaggtaa

SEQ ID NO: 3981 - RNA, 20 nt, synthetic construct
  source 1..20: mol_type = other RNA
agtcaaaatgttgaaaggta

SEQ ID NO: 3982 - RNA, 20 nt, synthetic construct
  source 1..20: mol_type = other RNA
cagtcaaaatgttgaaaggt

SEQ ID NO: 3983 - RNA, 20 nt, synthetic construct
  source 1..20: mol_type = other RNA
gcagtcaaaatgttgaaagg

SEQ ID NO: 3984 - RNA, 20 nt, synthetic construct
  source 1..20: mol_type = other RNA
agcagtcaaaatgttgaaag

SEQ ID NO: 3985 - RNA, 20 nt, synthetic construct
  source 1..20: mol_type = other RNA
cacagagacttggcagccag

SEQ ID NO: 3986 - RNA, 20 nt, synthetic construct
  source 1..20: mol_type = other RNA
acagagacttggcagccaga

SEQ ID NO: 3987 - RNA, 20 nt, synthetic construct
  source 1..20: mol_type = other RNA
cagagacttggcagccagaa

SEQ ID NO: 3988 - RNA, 20 nt, synthetic construct
  source 1..20: mol_type = other RNA
agagacttggcagccagaaa

SEQ ID NO: 3989 - RNA, 20 nt, synthetic construct
  source 1..20: mol_type = other RNA
gagacttggcagccagaaat

SEQ ID NO: 3990 - RNA, 20 nt, synthetic construct
  source 1..20: mol_type = other RNA
agaaatatcctccttactca

SEQ ID NO: 3991 - RNA, 20 nt, synthetic construct
  source 1..20: mol_type = other RNA
gaaatatcctccttactcat

SEQ ID NO: 3992 - RNA, 20 nt, synthetic construct
  source 1..20: mol_type = other RNA
agccagaaatatcctcctta

SEQ ID NO: 3993 - RNA, 20 nt, synthetic construct
  source 1..20: mol_type = other RNA
gccagaaatatcctccttac

SEQ ID NO: 3994 - RNA, 20 nt, synthetic construct
  source 1..20: mol_type = other RNA
ccagaaatatcctccttact

SEQ ID NO: 3995 - RNA, 20 nt, synthetic construct
  source 1..20: mol_type = other RNA
cagaaatatcctccttactc

SEQ ID NO: 3996 - RNA, 20 nt, synthetic construct
  source 1..20: mol_type = other RNA
tgtaaagatgctcaagcgta

SEQ ID NO: 3997 - RNA, 20 nt, synthetic construct
  source 1..20: mol_type = other RNA
cgctgtaaagatgctcaagc

SEQ ID NO: 3998 - RNA, 20 nt, synthetic construct
  source 1..20: mol_type = other RNA
gctgtaaagatgctcaagcg

SEQ ID NO: 3999 - RNA, 20 nt, synthetic construct
  source 1..20: mol_type = other RNA
ctgtaaagatgctcaagcgt

SEQ ID NO: 4000 - RNA, 20 nt, synthetic construct
  source 1..20: mol_type = other RNA
gtaaagatgctcaagcgtaa

SEQ ID NO: 4001 - RNA, 20 nt, synthetic construct
  source 1..20: mol_type = other RNA
taaagatgctcaagcgtaag

SEQ ID NO: 4002 - RNA, 20 nt, synthetic construct
  source 1..20: mol_type = other RNA
atcacagacttcgggctgtt

SEQ ID NO: 4003 - RNA, 20 nt, synthetic construct
  source 1..20: mol_type = other RNA
tcacagacttcgggctgttt

SEQ ID NO: 4004 - RNA, 20 nt, synthetic construct
  source 1..20: mol_type = other RNA
cacagacttcgggctgtttg

SEQ ID NO: 4005 - RNA, 20 nt, synthetic construct
  source 1..20: mol_type = other RNA
acagacttcgggctgtttgg

SEQ ID NO: 4006 - RNA, 20 nt, synthetic construct
  source 1..20: mol_type = other RNA
cagacttcgggctgtttggg

SEQ ID NO: 4007 - RNA, 20 nt, synthetic construct
  source 1..20: mol_type = other RNA
aaagatctcaaatctaagaa

SEQ ID NO: 4008 - RNA, 20 nt, synthetic construct
  source 1..20: mol_type = other RNA
cacaaagatctcaaatctaa

SEQ ID NO: 4009 - RNA, 20 nt, synthetic construct
  source 1..20: mol_type = other RNA
acaaagatctcaaatctaag

SEQ ID NO: 4010 - RNA, 20 nt, synthetic construct
  source 1..20: mol_type = other RNA
caaagatctcaaatctaaga

SEQ ID NO: 4011 - RNA, 20 nt, synthetic construct
  source 1..20: mol_type = other RNA
aagatctcaaatctaagaac

SEQ ID NO: 4012 - RNA, 20 nt, synthetic construct
  source 1..20: mol_type = other RNA
atctaagaacgtcttctatg

SEQ ID NO: 4013 - RNA, 20 nt, synthetic construct
  source 1..20: mol_type = other RNA
tctaagaacgtcttctatga

SEQ ID NO: 4014 - RNA, 20 nt, synthetic construct
  source 1..20: mol_type = other RNA
ctaagaacgtcttctatgac

SEQ ID NO: 4015 - RNA, 20 nt, synthetic construct
  source 1..20: mol_type = other RNA
taagaacgtcttctatgaca

SEQ ID NO: 4016 - RNA, 20 nt, synthetic construct
  source 1..20: mol_type = other RNA
aagaacgtcttctatgacaa

SEQ ID NO: 4017 - RNA, 20 nt, synthetic construct
  source 1..20: mol_type = other RNA
agaacgtcttctatgacaac

SEQ ID NO: 4018 - RNA, 20 nt, synthetic construct
  source 1..20: mol_type = other RNA
tcacggactttggactcttc

SEQ ID NO: 4019 - RNA, 20 nt, synthetic construct
  source 1..20: mol_type = other RNA
cggactttggactcttcagc

SEQ ID NO: 4020 - RNA, 20 nt, synthetic construct
  source 1..20: mol_type = other RNA
acggactttggactcttcag

SEQ ID NO: 4021 - RNA, 20 nt, synthetic construct
  source 1..20: mol_type = other RNA
cacggactttggactcttca

SEQ ID NO: 4022 - RNA, 20 nt, synthetic construct
  source 1..20: mol_type = other RNA
atcacggactttggactctt

SEQ ID NO: 4023 - RNA, 20 nt, synthetic construct
  source 1..20: mol_type = other RNA
aaggacctcaagtcaaagaa

SEQ ID NO: 4024 - RNA, 20 nt, synthetic construct
  source 1..20: mol_type = other RNA
aggacctcaagtcaaagaac

SEQ ID NO: 4025 - RNA, 20 nt, synthetic construct
  source 1..20: mol_type = other RNA
caaggacctcaagtcaaaga

SEQ ID NO: 4026 - RNA, 20 nt, synthetic construct
  source 1..20: mol_type = other RNA
acaaggacctcaagtcaaag

SEQ ID NO: 4027 - RNA, 20 nt, synthetic construct
  source 1..20: mol_type = other RNA
cacaaggacctcaagtcaaa

SEQ ID NO: 4028 - RNA, 20 nt, synthetic construct
  source 1..20: mol_type = other RNA
aaagaacgtcttctatgaca

SEQ ID NO: 4029 - RNA, 20 nt, synthetic construct
  source 1..20: mol_type = other RNA
caaagaacgtcttctatgac

SEQ ID NO: 4030 - RNA, 20 nt, synthetic construct
  source 1..20: mol_type = other RNA
tcaaagaacgtcttctatga

SEQ ID NO: 4031 - RNA, 20 nt, synthetic construct
  source 1..20: mol_type = other RNA
gtcaaagaacgtcttctatg

SEQ ID NO: 4032 - RNA, 20 nt, synthetic construct
  source 1..20: mol_type = other RNA
ctgactttggcctctgcact

SEQ ID NO: 4033 - RNA, 20 nt, synthetic construct
  source 1..20: mol_type = other RNA
actgactttggcctctgcac

SEQ ID NO: 4034 - RNA, 20 nt, synthetic construct
  source 1..20: mol_type = other RNA
gactgactttggcctctgca

SEQ ID NO: 4035 - RNA, 20 nt, synthetic construct
  source 1..20: mol_type = other RNA
tgactgactttggcctctgc

SEQ ID NO: 4036 - RNA, 20 nt, synthetic construct
  source 1..20: mol_type = other RNA
ttgactgactttggcctctg

SEQ ID NO: 4037 - RNA, 20 nt, synthetic construct
  source 1..20: mol_type = other RNA
gagatattaaacctgataat

SEQ ID NO: 4038 - RNA, 20 nt, synthetic construct
  source 1..20: mol_type = other RNA
agagatattaaacctgataa

SEQ ID NO: 4039 - RNA, 20 nt, synthetic construct
  source 1..20: mol_type = other RNA
tagagatattaaacctgata

SEQ ID NO: 4040 - RNA, 20 nt, synthetic construct
  source 1..20: mol_type = other RNA
atagagatattaaacctgat

SEQ ID NO: 4041 - RNA, 20 nt, synthetic construct
  source 1..20: mol_type = other RNA
catagagatattaaacctga

SEQ ID NO: 4042 - RNA, 20 nt, synthetic construct
  source 1..20: mol_type = other RNA
cagatttcggcctctgcact

SEQ ID NO: 4043 - RNA, 20 nt, synthetic construct
  source 1..20: mol_type = other RNA
acagatttcggcctctgcac

SEQ ID NO: 4044 - RNA, 20 nt, synthetic construct
  source 1..20: mol_type = other RNA
cacagatttcggcctctgca

SEQ ID NO: 4045 - RNA, 20 nt, synthetic construct
  source 1..20: mol_type = other RNA
tcacagatttcggcctctgc

SEQ ID NO: 4046 - RNA, 20 nt, synthetic construct
  source 1..20: mol_type = other RNA
ctcacagatttcggcctctg

SEQ ID NO: 4047 - RNA, 20 nt, synthetic construct
  source 1..20: mol_type = other RNA
gagacatcaagcctgataac

SEQ ID NO: 4048 - RNA, 20 nt, synthetic construct
  source 1..20: mol_type = other RNA
cgagacatcaagcctgataa

SEQ ID NO: 4049 - RNA, 20 nt, synthetic construct
  source 1..20: mol_type = other RNA
ccgagacatcaagcctgata

SEQ ID NO: 4050 - RNA, 20 nt, synthetic construct
  source 1..20: mol_type = other RNA
accgagacatcaagcctgat

SEQ ID NO: 4051 - RNA, 20 nt, synthetic construct
  source 1..20: mol_type = other RNA
caccgagacatcaagcctga

SEQ ID NO: 4052 - RNA, 20 nt, synthetic construct
  source 1..20: mol_type = other RNA
catgaagaccctaaggaaaa

SEQ ID NO: 4053 - RNA, 20 nt, synthetic construct
  source 1..20: mol_type = other RNA
ccatgaagaccctaaggaaa

SEQ ID NO: 4054 - RNA, 20 nt, synthetic construct
  source 1..20: mol_type = other RNA
gccatgaagaccctaaggaa

SEQ ID NO: 4055 - RNA, 20 nt, synthetic construct
  source 1..20: mol_type = other RNA
cgccatgaagaccctaagga

SEQ ID NO: 4056 - RNA, 20 nt, synthetic construct
  source 1..20: mol_type = other RNA
ttgcagactttggcctagca

SEQ ID NO: 4057 - RNA, 20 nt, synthetic construct
  source 1..20: mol_type = other RNA
attgcagactttggcctagc

SEQ ID NO: 4058 - RNA, 20 nt, synthetic construct
  source 1..20: mol_type = other RNA
tgcagactttggcctagcac

SEQ ID NO: 4059 - RNA, 20 nt, synthetic construct
  source 1..20: mol_type = other RNA
gcagactttggcctagcacg

SEQ ID NO: 4060 - RNA, 20 nt, synthetic construct
  source 1..20: mol_type = other RNA
cagactttggcctagcacgc

SEQ ID NO: 4061 - RNA, 20 nt, synthetic construct
  source 1..20: mol_type = other RNA
catcgtgaccttcgggctgc

SEQ ID NO: 4062 - RNA, 20 nt, synthetic construct
  source 1..20: mol_type = other RNA
atcgtgaccttcgggctgcc

SEQ ID NO: 4063 - RNA, 20 nt, synthetic construct
  source 1..20: mol_type = other RNA
tcgtgaccttcgggctgcca

SEQ ID NO: 4064 - RNA, 20 nt, synthetic construct
  source 1..20: mol_type = other RNA
cgtgaccttcgggctgccaa

SEQ ID NO: 4065 - RNA, 20 nt, synthetic construct
  source 1..20: mol_type = other RNA
gtgaccttcgggctgccaac

SEQ ID NO: 4066 - RNA, 20 nt, synthetic construct
  source 1..20: mol_type = other RNA
gctgccaacattctggtgtc

SEQ ID NO: 4067 - RNA, 20 nt, synthetic construct
  source 1..20: mol_type = other RNA
ggctgccaacattctggtgt

SEQ ID NO: 4068 - RNA, 20 nt, synthetic construct
  source 1..20: mol_type = other RNA
ctgccaacattctggtgtct

SEQ ID NO: 4069 - RNA, 20 nt, synthetic construct
  source 1..20: mol_type = other RNA
tgccaacattctggtgtctg

SEQ ID NO: 4070 - RNA, 20 nt, synthetic construct
  source 1..20: mol_type = other RNA
gccaacattctggtgtctga

SEQ ID NO: 4071 - RNA, 20 nt, synthetic construct
  source 1..20: mol_type = other RNA
ccaacattctggtgtctgac

SEQ ID NO: 4072 - RNA, 20 nt, synthetic construct
  source 1..20: mol_type = other RNA
ggcggtgaagagcctgaagc

SEQ ID NO: 4073 - RNA, 20 nt, synthetic construct
  source 1..20: mol_type = other RNA
gcggtgaagagcctgaagca

SEQ ID NO: 4074 - RNA, 20 nt, synthetic construct
  source 1..20: mol_type = other RNA
cggtgaagagcctgaagcag

SEQ ID NO: 4075 - RNA, 20 nt, synthetic construct
  source 1..20: mol_type = other RNA
tgaagagcctgaagcagggc

SEQ ID NO: 4076 - RNA, 20 nt, synthetic construct
  source 1..20: mol_type = other RNA
ggtgaagagcctgaagcagg

SEQ ID NO: 4077 - RNA, 20 nt, synthetic construct
  source 1..20: mol_type = other RNA
gtgaagagcctgaagcaggg

SEQ ID NO: 4078 - RNA, 20 nt, synthetic construct
  source 1..20: mol_type = other RNA
tggctgacttcgggctggcg

SEQ ID NO: 4079 - RNA, 20 nt, synthetic construct
  source 1..20: mol_type = other RNA
gtggctgacttcgggctggc

SEQ ID NO: 4080 - RNA, 20 nt, synthetic construct
  source 1..20: mol_type = other RNA
ggctgacttcgggctggcgc

SEQ ID NO: 4081 - RNA, 20 nt, synthetic construct
  source 1..20: mol_type = other RNA
gctgacttcgggctggcgcg

SEQ ID NO: 4082 - RNA, 20 nt, synthetic construct
  source 1..20: mol_type = other RNA
ctgacttcgggctggcgcgt

SEQ ID NO: 4083 - RNA, 20 nt, synthetic construct
  source 1..20: mol_type = other RNA
gagacctcaactcccacaac

SEQ ID NO: 4084 - RNA, 20 nt, synthetic construct
  source 1..20: mol_type = other RNA
caccgagacctcaactccca

SEQ ID NO: 4085 - RNA, 20 nt, synthetic construct
  source 1..20: mol_type = other RNA
accgagacctcaactcccac

SEQ ID NO: 4086 - RNA, 20 nt, synthetic construct
  source 1..20: mol_type = other RNA
ccgagacctcaactcccaca

SEQ ID NO: 4087 - RNA, 20 nt, synthetic construct
  source 1..20: mol_type = other RNA
cgagacctcaactcccacaa

SEQ ID NO: 4088 - RNA, 20 nt, synthetic construct
  source 1..20: mol_type = other RNA
tcccacaactgcctggtccg

SEQ ID NO: 4089 - RNA, 20 nt, synthetic construct
  source 1..20: mol_type = other RNA
ccacaactgcctggtccgcg

SEQ ID NO: 4090 - RNA, 20 nt, synthetic construct
  source 1..20: mol_type = other RNA
cacaactgcctggtccgcga

SEQ ID NO: 4091 - RNA, 20 nt, synthetic construct
  source 1..20: mol_type = other RNA
ctcccacaactgcctggtcc

SEQ ID NO: 4092 - RNA, 20 nt, synthetic construct
  source 1..20: mol_type = other RNA
cccacaactgcctggtccgc

SEQ ID NO: 4093 - RNA, 20 nt, synthetic construct
  source 1..20: mol_type = other RNA
acaactgcctggtccgcgag

SEQ ID NO: 4094 - RNA, 20 nt, synthetic construct
  source 1..20: mol_type = other RNA
ggtgatgaaggagctgatcc

SEQ ID NO: 4095 - RNA, 20 nt, synthetic construct
  source 1..20: mol_type = other RNA
atgaaggagctgatccggtt

SEQ ID NO: 4096 - RNA, 20 nt, synthetic construct
  source 1..20: mol_type = other RNA
gtgatgaaggagctgatccg

SEQ ID NO: 4097 - RNA, 20 nt, synthetic construct
  source 1..20: mol_type = other RNA
tgatgaaggagctgatccgg

SEQ ID NO: 4098 - RNA, 20 nt, synthetic construct
  source 1..20: mol_type = other RNA
gatgaaggagctgatccggt

SEQ ID NO: 4099 - RNA, 20 nt, synthetic construct
  source 1..20: mol_type = other RNA
tgaaggagctgatccggttc

SEQ ID NO: 4100 - RNA, 20 nt, synthetic construct
  source 1..20: mol_type = other RNA
tggcagactttgggctgtca

SEQ ID NO: 4101 - RNA, 20 nt, synthetic construct
  source 1..20: mol_type = other RNA
ggcagactttgggctgtcac

SEQ ID NO: 4102 - RNA, 20 nt, synthetic construct
  source 1..20: mol_type = other RNA
gtggcagactttgggctgtc

SEQ ID NO: 4103 - RNA, 20 nt, synthetic construct
  source 1..20: mol_type = other RNA
gcagactttgggctgtcacg

SEQ ID NO: 4104 - RNA, 20 nt, synthetic construct
  source 1..20: mol_type = other RNA
cagactttgggctgtcacgg

SEQ ID NO: 4105 - RNA, 20 nt, synthetic construct
  source 1..20: mol_type = other RNA
gggatctgaactcgcacaac

SEQ ID NO: 4106 - RNA, 20 nt, synthetic construct
  source 1..20: mol_type = other RNA
caccgggatctgaactcgca

SEQ ID NO: 4107 - RNA, 20 nt, synthetic construct
  source 1..20: mol_type = other RNA
accgggatctgaactcgcac

SEQ ID NO: 4108 - RNA, 20 nt, synthetic construct
  source 1..20: mol_type = other RNA
ccgggatctgaactcgcaca

SEQ ID NO: 4109 - RNA, 20 nt, synthetic construct
  source 1..20: mol_type = other RNA
cgggatctgaactcgcacaa

SEQ ID NO: 4110 - RNA, 20 nt, synthetic construct
  source 1..20: mol_type = other RNA
ctcgcacaactgcctcatca

SEQ ID NO: 4111 - RNA, 20 nt, synthetic construct
  source 1..20: mol_type = other RNA
gcacaactgcctcatcaagt

SEQ ID NO: 4112 - RNA, 20 nt, synthetic construct
  source 1..20: mol_type = other RNA
cacaactgcctcatcaagtt

SEQ ID NO: 4113 - RNA, 20 nt, synthetic construct
  source 1..20: mol_type = other RNA
tcgcacaactgcctcatcaa

SEQ ID NO: 4114 - RNA, 20 nt, synthetic construct
  source 1..20: mol_type = other RNA
cgcacaactgcctcatcaag

SEQ ID NO: 4115 - RNA, 20 nt, synthetic construct
  source 1..20: mol_type = other RNA
acaactgcctcatcaagttg

SEQ ID NO: 4116 - RNA, 20 nt, synthetic construct
  source 1..20: mol_type = other RNA
tcatgaaagagttaattcga

SEQ ID NO: 4117 - RNA, 20 nt, synthetic construct
  source 1..20: mol_type = other RNA
atgaaagagttaattcgatg

SEQ ID NO: 4118 - RNA, 20 nt, synthetic construct
  source 1..20: mol_type = other RNA
ggtcatgaaagagttaattc

SEQ ID NO: 4119 - RNA, 20 nt, synthetic construct
  source 1..20: mol_type = other RNA
gtcatgaaagagttaattcg

SEQ ID NO: 4120 - RNA, 20 nt, synthetic construct
  source 1..20: mol_type = other RNA
catgaaagagttaattcgat

SEQ ID NO: 4121 - RNA, 20 nt, synthetic construct
  source 1..20: mol_type = other RNA
tgaaagagttaattcgatgt

SEQ ID NO: 4122 - RNA, 20 nt, synthetic construct
  source 1..20: mol_type = other RNA
gaaagagttaattcgatgtg

SEQ ID NO: 4123 - RNA, 20 nt, synthetic construct
  source 1..20: mol_type = other RNA
gagattacggaataggattc

SEQ ID NO: 4124 - RNA, 20 nt, synthetic construct
  source 1..20: mol_type = other RNA
gtgggagattacggaatagg

SEQ ID NO: 4125 - RNA, 20 nt, synthetic construct
  source 1..20: mol_type = other RNA
tgggagattacggaatagga

SEQ ID NO: 4126 - RNA, 20 nt, synthetic construct
  source 1..20: mol_type = other RNA
gggagattacggaataggat

SEQ ID NO: 4127 - RNA, 20 nt, synthetic construct
  source 1..20: mol_type = other RNA
ggagattacggaataggatt

SEQ ID NO: 4128 - RNA, 20 nt, synthetic construct
  source 1..20: mol_type = other RNA
gtgatttagccctgcggaat

SEQ ID NO: 4129 - RNA, 20 nt, synthetic construct
  source 1..20: mol_type = other RNA
ttcagtgatttagccctgcg

SEQ ID NO: 4130 - RNA, 20 nt, synthetic construct
  source 1..20: mol_type = other RNA
tcagtgatttagccctgcgg

SEQ ID NO: 4131 - RNA, 20 nt, synthetic construct
  source 1..20: mol_type = other RNA
cagtgatttagccctgcgga

SEQ ID NO: 4132 - RNA, 20 nt, synthetic construct
  source 1..20: mol_type = other RNA
agtgatttagccctgcggaa

SEQ ID NO: 4133 - RNA, 20 nt, synthetic construct
  source 1..20: mol_type = other RNA
tcgtgaaggagttaaaagca

SEQ ID NO: 4134 - RNA, 20 nt, synthetic construct
  source 1..20: mol_type = other RNA
gtgaaggagttaaaagcaag

SEQ ID NO: 4135 - RNA, 20 nt, synthetic construct
  source 1..20: mol_type = other RNA
catcgtgaaggagttaaaag

SEQ ID NO: 4136 - RNA, 20 nt, synthetic construct
  source 1..20: mol_type = other RNA
atcgtgaaggagttaaaagc

SEQ ID NO: 4137 - RNA, 20 nt, synthetic construct
  source 1..20: mol_type = other RNA
cgtgaaggagttaaaagcaa

SEQ ID NO: 4138 - RNA, 20 nt, synthetic construct
  source 1..20: mol_type = other RNA
tgaaggagttaaaagcaagt

SEQ ID NO: 4139 - RNA, 20 nt, synthetic construct
  source 1..20: mol_type = other RNA
gagactacgggctggcccac

SEQ ID NO: 4140 - RNA, 20 nt, synthetic construct
  source 1..20: mol_type = other RNA
ggagactacgggctggccca

SEQ ID NO: 4141 - RNA, 20 nt, synthetic construct
  source 1..20: mol_type = other RNA
cggagactacgggctggccc

SEQ ID NO: 4142 - RNA, 20 nt, synthetic construct
  source 1..20: mol_type = other RNA
tcggagactacgggctggcc

SEQ ID NO: 4143 - RNA, 20 nt, synthetic construct
  source 1..20: mol_type = other RNA
atcggagactacgggctggc

SEQ ID NO: 4144 - RNA, 20 nt, synthetic construct
  source 1..20: mol_type = other RNA
gcgacctggccctgcgcaac

SEQ ID NO: 4145 - RNA, 20 nt, synthetic construct
  source 1..20: mol_type = other RNA
agcgacctggccctgcgcaa

SEQ ID NO: 4146 - RNA, 20 nt, synthetic construct
  source 1..20: mol_type = other RNA
cagcgacctggccctgcgca

SEQ ID NO: 4147 - RNA, 20 nt, synthetic construct
  source 1..20: mol_type = other RNA
gcagcgacctggccctgcgc

SEQ ID NO: 4148 - RNA, 20 nt, synthetic construct
  source 1..20: mol_type = other RNA
cgcagcgacctggccctgcg

SEQ ID NO: 4149 - RNA, 20 nt, synthetic construct
  source 1..20: mol_type = other RNA
cgcaactgcctgctgacctc

SEQ ID NO: 4150 - RNA, 20 nt, synthetic construct
  source 1..20: mol_type = other RNA
gcaactgcctgctgacctct

SEQ ID NO: 4151 - RNA, 20 nt, synthetic construct
  source 1..20: mol_type = other RNA
gcgcaactgcctgctgacct

SEQ ID NO: 4152 - RNA, 20 nt, synthetic construct
  source 1..20: mol_type = other RNA
tgcgcaactgcctgctgacc

SEQ ID NO: 4153 - RNA, 20 nt, synthetic construct
  source 1..20: mol_type = other RNA
ctgcgcaactgcctgctgac

SEQ ID NO: 4154 - RNA, 20 nt, synthetic construct
  source 1..20: mol_type = other RNA
cctgcgcaactgcctgctga

SEQ ID NO: 4155 - RNA, 20 nt, synthetic construct
  source 1..20: mol_type = other RNA
gtgaaggagctccgagccag

SEQ ID NO: 4156 - RNA, 20 nt, synthetic construct
  source 1..20: mol_type = other RNA
tggtgaaggagctccgagcc

SEQ ID NO: 4157 - RNA, 20 nt, synthetic construct
  source 1..20: mol_type = other RNA
tgaaggagctccgagccagc

SEQ ID NO: 4158 - RNA, 20 nt, synthetic construct
  source 1..20: mol_type = other RNA
ggtgaaggagctccgagcca

SEQ ID NO: 4159 - RNA, 20 nt, synthetic construct
  source 1..20: mol_type = other RNA
gtggtgaaggagctccgagc

SEQ ID NO: 4160 - RNA, 20 nt, synthetic construct
  source 1..20: mol_type = other RNA
ggtggtgaaggagctccgag

SEQ ID NO: 4161 - RNA, 20 nt, synthetic construct
  source 1..20: mol_type = other RNA
tatctgactacgggatttcg

SEQ ID NO: 4162 - RNA, 20 nt, synthetic construct
  source 1..20: mol_type = other RNA
atctgactacgggatttcga

SEQ ID NO: 4163 - RNA, 20 nt, synthetic construct
  source 1..20: mol_type = other RNA
ctatctgactacgggatttc

SEQ ID NO: 4164 - RNA, 20 nt, synthetic construct
  source 1..20: mol_type = other RNA
tctgactacgggatttcgag

SEQ ID NO: 4165 - RNA, 20 nt, synthetic construct
  source 1..20: mol_type = other RNA
ctgactacgggatttcgagg

SEQ ID NO: 4166 - RNA, 20 nt, synthetic construct
  source 1..20: mol_type = other RNA
ttctgtgacctgaagtcgga

SEQ ID NO: 4167 - RNA, 20 nt, synthetic construct
  source 1..20: mol_type = other RNA
tctgtgacctgaagtcggac

SEQ ID NO: 4168 - RNA, 20 nt, synthetic construct
  source 1..20: mol_type = other RNA
ctgtgacctgaagtcggaca

SEQ ID NO: 4169 - RNA, 20 nt, synthetic construct
  source 1..20: mol_type = other RNA
tgtgacctgaagtcggacaa

SEQ ID NO: 4170 - RNA, 20 nt, synthetic construct
  source 1..20: mol_type = other RNA
gtgacctgaagtcggacaac

SEQ ID NO: 4171 - RNA, 20 nt, synthetic construct
  source 1..20: mol_type = other RNA
gtcggacaacattctggtgt

SEQ ID NO: 4172 - RNA, 20 nt, synthetic construct
  source 1..20: mol_type = other RNA
tcggacaacattctggtgtg

SEQ ID NO: 4173 - RNA, 20 nt, synthetic construct
  source 1..20: mol_type = other RNA
cggacaacattctggtgtgg

SEQ ID NO: 4174 - RNA, 20 nt, synthetic construct
  source 1..20: mol_type = other RNA
ggacaacattctggtgtggt

SEQ ID NO: 4175 - RNA, 20 nt, synthetic construct
  source 1..20: mol_type = other RNA
gacaacattctggtgtggtc

SEQ ID NO: 4176 - RNA, 20 nt, synthetic construct
  source 1..20: mol_type = other RNA
acaacattctggtgtggtcc

SEQ ID NO: 4177 - RNA, 20 nt, synthetic construct
  source 1..20: mol_type = other RNA
ggccgtcaagcgcttccaca

SEQ ID NO: 4178 - RNA, 20 nt, synthetic construct
  source 1..20: mol_type = other RNA
gccgtcaagcgcttccacat

SEQ ID NO: 4179 - RNA, 20 nt, synthetic construct
  source 1..20: mol_type = other RNA
ccgtcaagcgcttccacatc

SEQ ID NO: 4180 - RNA, 20 nt, synthetic construct
  source 1..20: mol_type = other RNA
cgtcaagcgcttccacatca

SEQ ID NO: 4181 - RNA, 20 nt, synthetic construct
  source 1..20: mol_type = other RNA
gtcaagcgcttccacatcaa

SEQ ID NO: 4182 - RNA, 20 nt, synthetic construct
  source 1..20: mol_type = other RNA
tcaagcgcttccacatcaaa

SEQ ID NO: 4183 - RNA, 20 nt, synthetic construct
  source 1..20: mol_type = other RNA
tgctgactacggcattgctc

SEQ ID NO: 4184 - RNA, 20 nt, synthetic construct
  source 1..20: mol_type = other RNA
attgctgactacggcattgc

SEQ ID NO: 4185 - RNA, 20 nt, synthetic construct
  source 1..20: mol_type = other RNA
ttgctgactacggcattgct

SEQ ID NO: 4186 - RNA, 20 nt, synthetic construct
  source 1..20: mol_type = other RNA
gctgactacggcattgctca

SEQ ID NO: 4187 - RNA, 20 nt, synthetic construct
  source 1..20: mol_type = other RNA
ctgactacggcattgctcag

SEQ ID NO: 4188 - RNA, 20 nt, synthetic construct
  source 1..20: mol_type = other RNA
cgagacctgaaaccccacaa

SEQ ID NO: 4189 - RNA, 20 nt, synthetic construct
  source 1..20: mol_type = other RNA
taccgagacctgaaacccca

SEQ ID NO: 4190 - RNA, 20 nt, synthetic construct
  source 1..20: mol_type = other RNA
accgagacctgaaaccccac

SEQ ID NO: 4191 - RNA, 20 nt, synthetic construct
  source 1..20: mol_type = other RNA
ccgagacctgaaaccccaca

SEQ ID NO: 4192 - RNA, 20 nt, synthetic construct
  source 1..20: mol_type = other RNA
gagacctgaaaccccacaat

SEQ ID NO: 4193 - RNA, 20 nt, synthetic construct
  source 1..20: mol_type = other RNA
accccacaatgtgctgcttt

SEQ ID NO: 4194 - RNA, 20 nt, synthetic construct
  source 1..20: mol_type = other RNA
ggggactttgggatggcacg

SEQ ID NO: 4195 - RNA, 20 nt, synthetic construct
  source 1..20: mol_type = other RNA
ttggggactttgggatggca

SEQ ID NO: 4196 - RNA, 20 nt, synthetic construct
  source 1..20: mol_type = other RNA
gggactttgggatggcacga

SEQ ID NO: 4197 - RNA, 20 nt, synthetic construct
  source 1..20: mol_type = other RNA
tggggactttgggatggcac

SEQ ID NO: 4198 - RNA, 20 nt, synthetic construct
  source 1..20: mol_type = other RNA
attggggactttgggatggc

SEQ ID NO: 4199 - RNA, 20 nt, synthetic construct
  source 1..20: mol_type = other RNA
gggatattgccgcccggaac

SEQ ID NO: 4200 - RNA, 20 nt, synthetic construct
  source 1..20: mol_type = other RNA
agggatattgccgcccggaa

SEQ ID NO: 4201 - RNA, 20 nt, synthetic construct
  source 1..20: mol_type = other RNA
tagggatattgccgcccgga

SEQ ID NO: 4202 - RNA, 20 nt, synthetic construct
  source 1..20: mol_type = other RNA
gtagggatattgccgcccgg

SEQ ID NO: 4203 - RNA, 20 nt, synthetic construct
  source 1..20: mol_type = other RNA
tgtagggatattgccgcccg

SEQ ID NO: 4204 - RNA, 20 nt, synthetic construct
  source 1..20: mol_type = other RNA
cggaactgcctgctgagctg

SEQ ID NO: 4205 - RNA, 20 nt, synthetic construct
  source 1..20: mol_type = other RNA
cccggaactgcctgctgagc

SEQ ID NO: 4206 - RNA, 20 nt, synthetic construct
  source 1..20: mol_type = other RNA
ggaactgcctgctgagctgc

SEQ ID NO: 4207 - RNA, 20 nt, synthetic construct
  source 1..20: mol_type = other RNA
ccggaactgcctgctgagct

SEQ ID NO: 4208 - RNA, 20 nt, synthetic construct
  source 1..20: mol_type = other RNA
gcccggaactgcctgctgag

SEQ ID NO: 4209 - RNA, 20 nt, synthetic construct
  source 1..20: mol_type = other RNA
cgcccggaactgcctgctga

SEQ ID NO: 4210 - RNA, 20 nt, synthetic construct
  source 1..20: mol_type = other RNA
ctatcaaggtgagaggagtg

SEQ ID NO: 4211 - RNA, 20 nt, synthetic construct
  source 1..20: mol_type = other RNA
gctatcaaggtgagaggagt

SEQ ID NO: 4212 - RNA, 20 nt, synthetic construct
  source 1..20: mol_type = other RNA
agctatcaaggtgagaggag

SEQ ID NO: 4213 - RNA, 20 nt, synthetic construct
  source 1..20: mol_type = other RNA
tcaaggtgagaggagtggga

SEQ ID NO: 4214 - RNA, 20 nt, synthetic construct
  source 1..20: mol_type = other RNA
atcaaggtgagaggagtggg

SEQ ID NO: 4215 - RNA, 20 nt, synthetic construct
  source 1..20: mol_type = other RNA
tatcaaggtgagaggagtgg

SEQ ID NO: 4216 - RNA, 20 nt, synthetic construct
  source 1..20: mol_type = other RNA
cgggacctgcgagcagctaa

SEQ ID NO: 4217 - RNA, 20 nt, synthetic construct
  source 1..20: mol_type = other RNA
caccgggacctgcgagcagc

SEQ ID NO: 4218 - RNA, 20 nt, synthetic construct
  source 1..20: mol_type = other RNA
accgggacctgcgagcagct

SEQ ID NO: 4219 - RNA, 20 nt, synthetic construct
  source 1..20: mol_type = other RNA
ccgggacctgcgagcagcta

SEQ ID NO: 4220 - RNA, 20 nt, synthetic construct
  source 1..20: mol_type = other RNA
gggacctgcgagcagctaat

SEQ ID NO: 4221 - RNA, 20 nt, synthetic construct
  source 1..20: mol_type = other RNA
gcagctaatgttctggtctc

SEQ ID NO: 4222 - RNA, 20 nt, synthetic construct
  source 1..20: mol_type = other RNA
agctaatgttctggtctccg

SEQ ID NO: 4223 - RNA, 20 nt, synthetic construct
  source 1..20: mol_type = other RNA
agcagctaatgttctggtct

SEQ ID NO: 4224 - RNA, 20 nt, synthetic construct
  source 1..20: mol_type = other RNA
cagctaatgttctggtctcc

SEQ ID NO: 4225 - RNA, 20 nt, synthetic construct
  source 1..20: mol_type = other RNA
gctaatgttctggtctccga

SEQ ID NO: 4226 - RNA, 20 nt, synthetic construct
  source 1..20: mol_type = other RNA
ctaatgttctggtctccgag

SEQ ID NO: 4227 - RNA, 20 nt, synthetic construct
  source 1..20: mol_type = other RNA
gctgtgaaaaccctgaagcc

SEQ ID NO: 4228 - RNA, 20 nt, synthetic construct
  source 1..20: mol_type = other RNA
ctgtgaaaaccctgaagcca

SEQ ID NO: 4229 - RNA, 20 nt, synthetic construct
  source 1..20: mol_type = other RNA
ggctgtgaaaaccctgaagc

SEQ ID NO: 4230 - RNA, 20 nt, synthetic construct
  source 1..20: mol_type = other RNA
tgtgaaaaccctgaagccag

SEQ ID NO: 4231 - RNA, 20 nt, synthetic construct
  source 1..20: mol_type = other RNA
gtgaaaaccctgaagccagg

SEQ ID NO: 4232 - RNA, 20 nt, synthetic construct
  source 1..20: mol_type = other RNA
tgaaaaccctgaagccagga

SEQ ID NO: 4233 - RNA, 20 nt, synthetic construct
  source 1..20: mol_type = other RNA
gaaaaccctgaagccaggaa

SEQ ID NO: 4234 - RNA, 20 nt, synthetic construct
  source 1..20: mol_type = other RNA
gggacatgaaaccagaaaac

SEQ ID NO: 4235 - RNA, 20 nt, synthetic construct
  source 1..20: mol_type = other RNA
agggacatgaaaccagaaaa

SEQ ID NO: 4236 - RNA, 20 nt, synthetic construct
  source 1..20: mol_type = other RNA
tagggacatgaaaccagaaa

SEQ ID NO: 4237 - RNA, 20 nt, synthetic construct
  source 1..20: mol_type = other RNA
atagggacatgaaaccagaa

SEQ ID NO: 4238 - RNA, 20 nt, synthetic construct
  source 1..20: mol_type = other RNA
catagggacatgaaaccaga

SEQ ID NO: 4239 - RNA, 20 nt, synthetic construct
  source 1..20: mol_type = other RNA
cagaaaacttgctttgtatg

SEQ ID NO: 4240 - RNA, 20 nt, synthetic construct
  source 1..20: mol_type = other RNA
ccagaaaacttgctttgtat

SEQ ID NO: 4241 - RNA, 20 nt, synthetic construct
  source 1..20: mol_type = other RNA
accagaaaacttgctttgta

SEQ ID NO: 4242 - RNA, 20 nt, synthetic construct
  source 1..20: mol_type = other RNA
aaaacttgctttgtatgggt

SEQ ID NO: 4243 - RNA, 20 nt, synthetic construct
  source 1..20: mol_type = other RNA
gaaaacttgctttgtatggg

SEQ ID NO: 4244 - RNA, 20 nt, synthetic construct
  source 1..20: mol_type = other RNA
agaaaacttgctttgtatgg

SEQ ID NO: 4245 - RNA, 20 nt, synthetic construct
  source 1..20: mol_type = other RNA
ccatcaaaaggtactgtgtg

SEQ ID NO: 4246 - RNA, 20 nt, synthetic construct
  source 1..20: mol_type = other RNA
ggccatcaaaaggtactgtg

SEQ ID NO: 4247 - RNA, 20 nt, synthetic construct
  source 1..20: mol_type = other RNA
caaaaggtactgtgtgtgac

SEQ ID NO: 4248 - RNA, 20 nt, synthetic construct
  source 1..20: mol_type = other RNA
tcaaaaggtactgtgtgtga

SEQ ID NO: 4249 - RNA, 20 nt, synthetic construct
  source 1..20: mol_type = other RNA
atcaaaaggtactgtgtgtg

SEQ ID NO: 4250 - RNA, 20 nt, synthetic construct
  source 1..20: mol_type = other RNA
catcaaaaggtactgtgtgt

SEQ ID NO: 4251 - RNA, 20 nt, synthetic construct
  source 1..20: mol_type = other RNA
gccatcaaaaggtactgtgt

SEQ ID NO: 4252 - RNA, 20 nt, synthetic construct
  source 1..20: mol_type = other RNA
ctctgtgactttggggtcag

SEQ ID NO: 4253 - RNA, 20 nt, synthetic construct
  source 1..20: mol_type = other RNA
tctgtgactttggggtcagc

SEQ ID NO: 4254 - RNA, 20 nt, synthetic construct
  source 1..20: mol_type = other RNA
ctgtgactttggggtcagcg

SEQ ID NO: 4255 - RNA, 20 nt, synthetic construct
  source 1..20: mol_type = other RNA
tgtgactttggggtcagcgg

SEQ ID NO: 4256 - RNA, 20 nt, synthetic construct
  source 1..20: mol_type = other RNA
gtgactttggggtcagcggg

SEQ ID NO: 4257 - RNA, 20 nt, synthetic construct
  source 1..20: mol_type = other RNA
cctgcagatgtcaagccctc

SEQ ID NO: 4258 - RNA, 20 nt, synthetic construct
  source 1..20: mol_type = other RNA
ctgcagatgtcaagccctcc

SEQ ID NO: 4259 - RNA, 20 nt, synthetic construct
  source 1..20: mol_type = other RNA
tgcagatgtcaagccctcca

SEQ ID NO: 4260 - RNA, 20 nt, synthetic construct
  source 1..20: mol_type = other RNA
gcagatgtcaagccctccaa

SEQ ID NO: 4261 - RNA, 20 nt, synthetic construct
  source 1..20: mol_type = other RNA
cagatgtcaagccctccaac

SEQ ID NO: 4262 - RNA, 20 nt, synthetic construct
  source 1..20: mol_type = other RNA
ccaacatcctagtcaactcc

SEQ ID NO: 4263 - RNA, 20 nt, synthetic construct
  source 1..20: mol_type = other RNA
gccctccaacatcctagtca

SEQ ID NO: 4264 - RNA, 20 nt, synthetic construct
  source 1..20: mol_type = other RNA
ccctccaacatcctagtcaa

SEQ ID NO: 4265 - RNA, 20 nt, synthetic construct
  source 1..20: mol_type = other RNA
cctccaacatcctagtcaac

SEQ ID NO: 4266 - RNA, 20 nt, synthetic construct
  source 1..20: mol_type = other RNA
ctccaacatcctagtcaact

SEQ ID NO: 4267 - RNA, 20 nt, synthetic construct
  source 1..20: mol_type = other RNA
tccaacatcctagtcaactc

SEQ ID NO: 4268 - RNA, 20 nt, synthetic construct
  source 1..20: mol_type = other RNA
ccagaaaggtgagtttgcct

SEQ ID NO: 4269 - RNA, 20 nt, synthetic construct
  source 1..20: mol_type = other RNA
ggccagaaaggtgagtttgc

SEQ ID NO: 4270 - RNA, 20 nt, synthetic construct
  source 1..20: mol_type = other RNA
gccagaaaggtgagtttgcc

SEQ ID NO: 4271 - RNA, 20 nt, synthetic construct
  source 1..20: mol_type = other RNA
cagaaaggtgagtttgcctt

SEQ ID NO: 4272 - RNA, 20 nt, synthetic construct
  source 1..20: mol_type = other RNA
agaaaggtgagtttgccttg

SEQ ID NO: 4273 - RNA, 20 nt, synthetic construct
  source 1..20: mol_type = other RNA
gaaaggtgagtttgccttga

SEQ ID NO: 4274 - RNA, 20 nt, synthetic construct
  source 1..20: mol_type = other RNA
tgtgtgacttcggggtgagc

SEQ ID NO: 4275 - RNA, 20 nt, synthetic construct
  source 1..20: mol_type = other RNA
ctgtgtgacttcggggtgag

SEQ ID NO: 4276 - RNA, 20 nt, synthetic construct
  source 1..20: mol_type = other RNA
gtgacttcggggtgagcggc

SEQ ID NO: 4277 - RNA, 20 nt, synthetic construct
  source 1..20: mol_type = other RNA
tgtgacttcggggtgagcgg

SEQ ID NO: 4278 - RNA, 20 nt, synthetic construct
  source 1..20: mol_type = other RNA
gtgtgacttcggggtgagcg

SEQ ID NO: 4279 - RNA, 20 nt, synthetic construct
  source 1..20: mol_type = other RNA
cagatgtgaagccctccaac

SEQ ID NO: 4280 - RNA, 20 nt, synthetic construct
  source 1..20: mol_type = other RNA
ccagatgtgaagccctccaa

SEQ ID NO: 4281 - RNA, 20 nt, synthetic construct
  source 1..20: mol_type = other RNA
tccagatgtgaagccctcca

SEQ ID NO: 4282 - RNA, 20 nt, synthetic construct
  source 1..20: mol_type = other RNA
ctccagatgtgaagccctcc

SEQ ID NO: 4283 - RNA, 20 nt, synthetic construct
  source 1..20: mol_type = other RNA
cctccagatgtgaagccctc

SEQ ID NO: 4284 - RNA, 20 nt, synthetic construct
  source 1..20: mol_type = other RNA
ccaacatcctcgtgaactct

SEQ ID NO: 4285 - RNA, 20 nt, synthetic construct
  source 1..20: mol_type = other RNA
tccaacatcctcgtgaactc

SEQ ID NO: 4286 - RNA, 20 nt, synthetic construct
  source 1..20: mol_type = other RNA
ctccaacatcctcgtgaact

SEQ ID NO: 4287 - RNA, 20 nt, synthetic construct
  source 1..20: mol_type = other RNA
cctccaacatcctcgtgaac

SEQ ID NO: 4288 - RNA, 20 nt, synthetic construct
  source 1..20: mol_type = other RNA
ccctccaacatcctcgtgaa

SEQ ID NO: 4289 - RNA, 20 nt, synthetic construct
  source 1..20: mol_type = other RNA
gccctccaacatcctcgtga

SEQ ID NO: 4290 - RNA, 20 nt, synthetic construct
  source 1..20: mol_type = other RNA
caggaaggtgagcactgcgg

SEQ ID NO: 4291 - RNA, 20 nt, synthetic construct
  source 1..20: mol_type = other RNA
ccaggaaggtgagcactgcg

SEQ ID NO: 4292 - RNA, 20 nt, synthetic construct
  source 1..20: mol_type = other RNA
gccaggaaggtgagcactgc

SEQ ID NO: 4293 - RNA, 20 nt, synthetic construct
  source 1..20: mol_type = other RNA
ggccaggaaggtgagcactg

SEQ ID NO: 4294 - RNA, 20 nt, synthetic construct
  source 1..20: mol_type = other RNA
ggaaggtgagcactgcgggg

SEQ ID NO: 4295 - RNA, 20 nt, synthetic construct
  source 1..20: mol_type = other RNA
aggaaggtgagcactgcggg

SEQ ID NO: 4296 - RNA, 20 nt, synthetic construct
  source 1..20: mol_type = other RNA
atgtgtgactttggcatcag

SEQ ID NO: 4297 - RNA, 20 nt, synthetic construct
  source 1..20: mol_type = other RNA
tgtgtgactttggcatcagt

SEQ ID NO: 4298 - RNA, 20 nt, synthetic construct
  source 1..20: mol_type = other RNA
gtgtgactttggcatcagtg

SEQ ID NO: 4299 - RNA, 20 nt, synthetic construct
  source 1..20: mol_type = other RNA
tgtgactttggcatcagtgg

SEQ ID NO: 4300 - RNA, 20 nt, synthetic construct
  source 1..20: mol_type = other RNA
gtgactttggcatcagtggc

SEQ ID NO: 4301 - RNA, 20 nt, synthetic construct
  source 1..20: mol_type = other RNA
gcagatgtgaagccctccaa

SEQ ID NO: 4302 - RNA, 20 nt, synthetic construct
  source 1..20: mol_type = other RNA
ctggcagatgtgaagccctc

SEQ ID NO: 4303 - RNA, 20 nt, synthetic construct
  source 1..20: mol_type = other RNA
tggcagatgtgaagccctcc

SEQ ID NO: 4304 - RNA, 20 nt, synthetic construct
  source 1..20: mol_type = other RNA
ggcagatgtgaagccctcca

SEQ ID NO: 4305 - RNA, 20 nt, synthetic construct
  source 1..20: mol_type = other RNA
cagatgtgaagccctccaat

SEQ ID NO: 4306 - RNA, 20 nt, synthetic construct
  source 1..20: mol_type = other RNA
ctccaatgtccttatcaaca

SEQ ID NO: 4307 - RNA, 20 nt, synthetic construct
  source 1..20: mol_type = other RNA
tccaatgtccttatcaacaa

SEQ ID NO: 4308 - RNA, 20 nt, synthetic construct
  source 1..20: mol_type = other RNA
gccctccaatgtccttatca

SEQ ID NO: 4309 - RNA, 20 nt, synthetic construct
  source 1..20: mol_type = other RNA
ccctccaatgtccttatcaa

SEQ ID NO: 4310 - RNA, 20 nt, synthetic construct
  source 1..20: mol_type = other RNA
cctccaatgtccttatcaac

SEQ ID NO: 4311 - RNA, 20 nt, synthetic construct
  source 1..20: mol_type = other RNA
ccaatgtccttatcaacaag

SEQ ID NO: 4312 - RNA, 20 nt, synthetic construct
  source 1..20: mol_type = other RNA
ccgtgaaggtgagcagggcc

SEQ ID NO: 4313 - RNA, 20 nt, synthetic construct
  source 1..20: mol_type = other RNA
cgtgaaggtgagcagggcct

SEQ ID NO: 4314 - RNA, 20 nt, synthetic construct
  source 1..20: mol_type = other RNA
tgaaggtgagcagggcctgg

SEQ ID NO: 4315 - RNA, 20 nt, synthetic construct
  source 1..20: mol_type = other RNA
ggccgtgaaggtgagcaggg

SEQ ID NO: 4316 - RNA, 20 nt, synthetic construct
  source 1..20: mol_type = other RNA
gccgtgaaggtgagcagggc

SEQ ID NO: 4317 - RNA, 20 nt, synthetic construct
  source 1..20: mol_type = other RNA
gtgaaggtgagcagggcctg

SEQ ID NO: 4318 - RNA, 20 nt, synthetic construct
  source 1..20: mol_type = other RNA
ctctgtgacttcggcatcag

SEQ ID NO: 4319 - RNA, 20 nt, synthetic construct
  source 1..20: mol_type = other RNA
tctgtgacttcggcatcagt

SEQ ID NO: 4320 - RNA, 20 nt, synthetic construct
  source 1..20: mol_type = other RNA
ctgtgacttcggcatcagtg

SEQ ID NO: 4321 - RNA, 20 nt, synthetic construct
  source 1..20: mol_type = other RNA
tgtgacttcggcatcagtgg

SEQ ID NO: 4322 - RNA, 20 nt, synthetic construct
  source 1..20: mol_type = other RNA
gtgacttcggcatcagtgga

SEQ ID NO: 4323 - RNA, 20 nt, synthetic construct
  source 1..20: mol_type = other RNA
cttgcagatatcaaaccttc

SEQ ID NO: 4324 - RNA, 20 nt, synthetic construct
  source 1..20: mol_type = other RNA
ttgcagatatcaaaccttcc

SEQ ID NO: 4325 - RNA, 20 nt, synthetic construct
  source 1..20: mol_type = other RNA
tgcagatatcaaaccttcca

SEQ ID NO: 4326 - RNA, 20 nt, synthetic construct
  source 1..20: mol_type = other RNA
gcagatatcaaaccttccaa

SEQ ID NO: 4327 - RNA, 20 nt, synthetic construct
  source 1..20: mol_type = other RNA
cagatatcaaaccttccaat

SEQ ID NO: 4328 - RNA, 20 nt, synthetic construct
  source 1..20: mol_type = other RNA
cttccaatattcttctggac

SEQ ID NO: 4329 - RNA, 20 nt, synthetic construct
  source 1..20: mol_type = other RNA
ccaatattcttctggacaga

SEQ ID NO: 4330 - RNA, 20 nt, synthetic construct
  source 1..20: mol_type = other RNA
accttccaatattcttctgg

SEQ ID NO: 4331 - RNA, 20 nt, synthetic construct
  source 1..20: mol_type = other RNA
ccttccaatattcttctgga

SEQ ID NO: 4332 - RNA, 20 nt, synthetic construct
  source 1..20: mol_type = other RNA
ttccaatattcttctggaca

SEQ ID NO: 4333 - RNA, 20 nt, synthetic construct
  source 1..20: mol_type = other RNA
tccaatattcttctggacag

SEQ ID NO: 4334 - RNA, 20 nt, synthetic construct
  source 1..20: mol_type = other RNA
agttaaagtaggtgatgcca

SEQ ID NO: 4335 - RNA, 20 nt, synthetic construct
  source 1..20: mol_type = other RNA
ggcagttaaagtaggtgatg

SEQ ID NO: 4336 - RNA, 20 nt, synthetic construct
  source 1..20: mol_type = other RNA
gcagttaaagtaggtgatgc

SEQ ID NO: 4337 - RNA, 20 nt, synthetic construct
  source 1..20: mol_type = other RNA
cagttaaagtaggtgatgcc

SEQ ID NO: 4338 - RNA, 20 nt, synthetic construct
  source 1..20: mol_type = other RNA
gttaaagtaggtgatgccat

SEQ ID NO: 4339 - RNA, 20 nt, synthetic construct
  source 1..20: mol_type = other RNA
ttaaagtaggtgatgccatg

SEQ ID NO: 4340 - RNA, 20 nt, synthetic construct
  source 1..20: mol_type = other RNA
taaagtaggtgatgccatga

SEQ ID NO: 4341 - RNA, 20 nt, synthetic construct
  source 1..20: mol_type = other RNA
tttagacgtgaagccctcca

SEQ ID NO: 4342 - RNA, 20 nt, synthetic construct
  source 1..20: mol_type = other RNA
ttagacgtgaagccctccaa

SEQ ID NO: 4343 - RNA, 20 nt, synthetic construct
  source 1..20: mol_type = other RNA
tagacgtgaagccctccaat

SEQ ID NO: 4344 - RNA, 20 nt, synthetic construct
  source 1..20: mol_type = other RNA
ccaatatgctagtaaacaca

SEQ ID NO: 4345 - RNA, 20 nt, synthetic construct
  source 1..20: mol_type = other RNA
gccctccaatatgctagtaa

SEQ ID NO: 4346 - RNA, 20 nt, synthetic construct
  source 1..20: mol_type = other RNA
ccctccaatatgctagtaaa

SEQ ID NO: 4347 - RNA, 20 nt, synthetic construct
  source 1..20: mol_type = other RNA
cctccaatatgctagtaaac

SEQ ID NO: 4348 - RNA, 20 nt, synthetic construct
  source 1..20: mol_type = other RNA
ctccaatatgctagtaaaca

SEQ ID NO: 4349 - RNA, 20 nt, synthetic construct
  source 1..20: mol_type = other RNA
tccaatatgctagtaaacac

SEQ ID NO: 4350 - RNA, 20 nt, synthetic construct
  source 1..20: mol_type = other RNA
agctgtaaaggtaagtactg

SEQ ID NO: 4351 - RNA, 20 nt, synthetic construct
  source 1..20: mol_type = other RNA
gctgtaaaggtaagtactgg

SEQ ID NO: 4352 - RNA, 20 nt, synthetic construct
  source 1..20: mol_type = other RNA
ctgtaaaggtaagtactgga

SEQ ID NO: 4353 - RNA, 20 nt, synthetic construct
  source 1..20: mol_type = other RNA
tgtaaaggtaagtactggat

SEQ ID NO: 4354 - RNA, 20 nt, synthetic construct
  source 1..20: mol_type = other RNA
gtaaaggtaagtactggata

SEQ ID NO: 4355 - RNA, 20 nt, synthetic construct
  source 1..20: mol_type = other RNA
taaaggtaagtactggatac

SEQ ID NO: 4356 - RNA, 20 nt, synthetic construct
  source 1..20: mol_type = other RNA
tcagacgtcaagccttctaa

SEQ ID NO: 4357 - RNA, 20 nt, synthetic construct
  source 1..20: mol_type = other RNA
ctttcagacgtcaagccttc

SEQ ID NO: 4358 - RNA, 20 nt, synthetic construct
  source 1..20: mol_type = other RNA
tttcagacgtcaagccttct

SEQ ID NO: 4359 - RNA, 20 nt, synthetic construct
  source 1..20: mol_type = other RNA
ttcagacgtcaagccttcta

SEQ ID NO: 4360 - RNA, 20 nt, synthetic construct
  source 1..20: mol_type = other RNA
cagacgtcaagccttctaat

SEQ ID NO: 4361 - RNA, 20 nt, synthetic construct
  source 1..20: mol_type = other RNA
ccttctaatgtactcatcaa

SEQ ID NO: 4362 - RNA, 20 nt, synthetic construct
  source 1..20: mol_type = other RNA
gccttctaatgtactcatca

SEQ ID NO: 4363 - RNA, 20 nt, synthetic construct
  source 1..20: mol_type = other RNA
cttctaatgtactcatcaat

SEQ ID NO: 4364 - RNA, 20 nt, synthetic construct
  source 1..20: mol_type = other RNA
ttctaatgtactcatcaatg

SEQ ID NO: 4365 - RNA, 20 nt, synthetic construct
  source 1..20: mol_type = other RNA
tctaatgtactcatcaatgc

SEQ ID NO: 4366 - RNA, 20 nt, synthetic construct
  source 1..20: mol_type = other RNA
ctaatgtactcatcaatgct

SEQ ID NO: 4367 - RNA, 20 nt, synthetic construct
  source 1..20: mol_type = other RNA
ggcagtgaaggtagagttga

SEQ ID NO: 4368 - RNA, 20 nt, synthetic construct
  source 1..20: mol_type = other RNA
gcagtgaaggtagagttgac

SEQ ID NO: 4369 - RNA, 20 nt, synthetic construct
  source 1..20: mol_type = other RNA
cagtgaaggtagagttgaca

SEQ ID NO: 4370 - RNA, 20 nt, synthetic construct
  source 1..20: mol_type = other RNA
agtgaaggtagagttgacat

SEQ ID NO: 4371 - RNA, 20 nt, synthetic construct
  source 1..20: mol_type = other RNA
gtgaaggtagagttgacatt

SEQ ID NO: 4372 - RNA, 20 nt, synthetic construct
  source 1..20: mol_type = other RNA
tgaaggtagagttgacattc

SEQ ID NO: 4373 - RNA, 20 nt, synthetic construct
  source 1..20: mol_type = other RNA
ctctgcgacttcggcatcag

SEQ ID NO: 4374 - RNA, 20 nt, synthetic construct
  source 1..20: mol_type = other RNA
tctgcgacttcggcatcagc

SEQ ID NO: 4375 - RNA, 20 nt, synthetic construct
  source 1..20: mol_type = other RNA
gcgacttcggcatcagcggc

SEQ ID NO: 4376 - RNA, 20 nt, synthetic construct
  source 1..20: mol_type = other RNA
ctgcgacttcggcatcagcg

SEQ ID NO: 4377 - RNA, 20 nt, synthetic construct
  source 1..20: mol_type = other RNA
tgcgacttcggcatcagcgg

SEQ ID NO: 4378 - RNA, 20 nt, synthetic construct
  source 1..20: mol_type = other RNA
caccgcgacgtcaagccctc

SEQ ID NO: 4379 - RNA, 20 nt, synthetic construct
  source 1..20: mol_type = other RNA
accgcgacgtcaagccctcc

SEQ ID NO: 4380 - RNA, 20 nt, synthetic construct
  source 1..20: mol_type = other RNA
ccgcgacgtcaagccctcca

SEQ ID NO: 4381 - RNA, 20 nt, synthetic construct
  source 1..20: mol_type = other RNA
cgcgacgtcaagccctccaa

SEQ ID NO: 4382 - RNA, 20 nt, synthetic construct
  source 1..20: mol_type = other RNA
gcgacgtcaagccctccaac

SEQ ID NO: 4383 - RNA, 20 nt, synthetic construct
  source 1..20: mol_type = other RNA
ccctccaacatcctgctgga

SEQ ID NO: 4384 - RNA, 20 nt, synthetic construct
  source 1..20: mol_type = other RNA
ctccaacatcctgctggacg

SEQ ID NO: 4385 - RNA, 20 nt, synthetic construct
  source 1..20: mol_type = other RNA
ccaacatcctgctggacgag

SEQ ID NO: 4386 - RNA, 20 nt, synthetic construct
  source 1..20: mol_type = other RNA
gccctccaacatcctgctgg

SEQ ID NO: 4387 - RNA, 20 nt, synthetic construct
  source 1..20: mol_type = other RNA
cctccaacatcctgctggac

SEQ ID NO: 4388 - RNA, 20 nt, synthetic construct
  source 1..20: mol_type = other RNA
tccaacatcctgctggacga

SEQ ID NO: 4389 - RNA, 20 nt, synthetic construct
  source 1..20: mol_type = other RNA
gccgttaaggtgagccttgg

SEQ ID NO: 4390 - RNA, 20 nt, synthetic construct
  source 1..20: mol_type = other RNA
ccgttaaggtgagccttggc

SEQ ID NO: 4391 - RNA, 20 nt, synthetic construct
  source 1..20: mol_type = other RNA
tgccgttaaggtgagccttg

SEQ ID NO: 4392 - RNA, 20 nt, synthetic construct
  source 1..20: mol_type = other RNA
cgttaaggtgagccttggcg

SEQ ID NO: 4393 - RNA, 20 nt, synthetic construct
  source 1..20: mol_type = other RNA
gttaaggtgagccttggcgg

SEQ ID NO: 4394 - RNA, 20 nt, synthetic construct
  source 1..20: mol_type = other RNA
ttaaggtgagccttggcggc

SEQ ID NO: 4395 - RNA, 20 nt, synthetic construct
  source 1..20: mol_type = other RNA
cacagagatgtcaaaggtga

SEQ ID NO: 4396 - RNA, 20 nt, synthetic construct
  source 1..20: mol_type = other RNA
acagagatgtcaaaggtgag

SEQ ID NO: 4397 - RNA, 20 nt, synthetic construct
  source 1..20: mol_type = other RNA
cagagatgtcaaaggtgaga

SEQ ID NO: 4398 - RNA, 20 nt, synthetic construct
  source 1..20: mol_type = other RNA
agagatgtcaaaggtgagaa

SEQ ID NO: 4399 - RNA, 20 nt, synthetic construct
  source 1..20: mol_type = other RNA
gagatgtcaaaggtgagaat

SEQ ID NO: 4400 - RNA, 20 nt, synthetic construct
  source 1..20: mol_type = other RNA
gtgccaatttgctaattgac

SEQ ID NO: 4401 - RNA, 20 nt, synthetic construct
  source 1..20: mol_type = other RNA
aggtgccaatttgctaattg

SEQ ID NO: 4402 - RNA, 20 nt, synthetic construct
  source 1..20: mol_type = other RNA
ggtgccaatttgctaattga

SEQ ID NO: 4403 - RNA, 20 nt, synthetic construct
  source 1..20: mol_type = other RNA
tgccaatttgctaattgaca

SEQ ID NO: 4404 - RNA, 20 nt, synthetic construct
  source 1..20: mol_type = other RNA
gccaatttgctaattgacag

SEQ ID NO: 4405 - RNA, 20 nt, synthetic construct
  source 1..20: mol_type = other RNA
ccaatttgctaattgacagc

SEQ ID NO: 4406 - RNA, 20 nt, synthetic construct
  source 1..20: mol_type = other RNA
tgttaaacaggtaaatatct

SEQ ID NO: 4407 - RNA, 20 nt, synthetic construct
  source 1..20: mol_type = other RNA
ttaaacaggtaaatatctag

SEQ ID NO: 4408 - RNA, 20 nt, synthetic construct
  source 1..20: mol_type = other RNA
ggctgttaaacaggtaaata

SEQ ID NO: 4409 - RNA, 20 nt, synthetic construct
  source 1..20: mol_type = other RNA
gctgttaaacaggtaaatat

SEQ ID NO: 4410 - RNA, 20 nt, synthetic construct
  source 1..20: mol_type = other RNA
ctgttaaacaggtaaatatc

SEQ ID NO: 4411 - RNA, 20 nt, synthetic construct
  source 1..20: mol_type = other RNA
gttaaacaggtaaatatcta

SEQ ID NO: 4412 - RNA, 20 nt, synthetic construct
  source 1..20: mol_type = other RNA
taaacaggtaaatatctagt

SEQ ID NO: 4413 - RNA, 20 nt, synthetic construct
  source 1..20: mol_type = other RNA
tcacggacttcggcctcgcc

SEQ ID NO: 4414 - RNA, 20 nt, synthetic construct
  source 1..20: mol_type = other RNA
acggacttcggcctcgcccg

SEQ ID NO: 4415 - RNA, 20 nt, synthetic construct
  source 1..20: mol_type = other RNA
atcacggacttcggcctcgc

SEQ ID NO: 4416 - RNA, 20 nt, synthetic construct
  source 1..20: mol_type = other RNA
cacggacttcggcctcgccc

SEQ ID NO: 4417 - RNA, 20 nt, synthetic construct
  source 1..20: mol_type = other RNA
cggacttcggcctcgcccgc

SEQ ID NO: 4418 - RNA, 20 nt, synthetic construct
  source 1..20: mol_type = other RNA
gggacctcaagtccatcaac

SEQ ID NO: 4419 - RNA, 20 nt, synthetic construct
  source 1..20: mol_type = other RNA
caccgggacctcaagtccat

SEQ ID NO: 4420 - RNA, 20 nt, synthetic construct
  source 1..20: mol_type = other RNA
accgggacctcaagtccatc

SEQ ID NO: 4421 - RNA, 20 nt, synthetic construct
  source 1..20: mol_type = other RNA
ccgggacctcaagtccatca

SEQ ID NO: 4422 - RNA, 20 nt, synthetic construct
  source 1..20: mol_type = other RNA
cgggacctcaagtccatcaa

SEQ ID NO: 4423 - RNA, 20 nt, synthetic construct
  source 1..20: mol_type = other RNA
gtccatcaacagtaagtggt

SEQ ID NO: 4424 - RNA, 20 nt, synthetic construct
  source 1..20: mol_type = other RNA
tccatcaacagtaagtggtg

SEQ ID NO: 4425 - RNA, 20 nt, synthetic construct
  source 1..20: mol_type = other RNA
ccatcaacagtaagtggtgt

SEQ ID NO: 4426 - RNA, 20 nt, synthetic construct
  source 1..20: mol_type = other RNA
catcaacagtaagtggtgtc

SEQ ID NO: 4427 - RNA, 20 nt, synthetic construct
  source 1..20: mol_type = other RNA
atcaacagtaagtggtgtcc

SEQ ID NO: 4428 - RNA, 20 nt, synthetic construct
  source 1..20: mol_type = other RNA
tcaacagtaagtggtgtcct

SEQ ID NO: 4429 - RNA, 20 nt, synthetic construct
  source 1..20: mol_type = other RNA
ggcagtcaaggccgcccggc

SEQ ID NO: 4430 - RNA, 20 nt, synthetic construct
  source 1..20: mol_type = other RNA
gcagtcaaggccgcccggct

SEQ ID NO: 4431 - RNA, 20 nt, synthetic construct
  source 1..20: mol_type = other RNA
cagtcaaggccgcccggctg

SEQ ID NO: 4432 - RNA, 20 nt, synthetic construct
  source 1..20: mol_type = other RNA
agtcaaggccgcccggctgg

SEQ ID NO: 4433 - RNA, 20 nt, synthetic construct
  source 1..20: mol_type = other RNA
gtcaaggccgcccggctgga

SEQ ID NO: 4434 - RNA, 20 nt, synthetic construct
  source 1..20: mol_type = other RNA
tcaaggccgcccggctggac

SEQ ID NO: 4435 - RNA, 20 nt, synthetic construct
  source 1..20: mol_type = other RNA
accgactttggcctggcccg

SEQ ID NO: 4436 - RNA, 20 nt, synthetic construct
  source 1..20: mol_type = other RNA
tcaccgactttggcctggcc

SEQ ID NO: 4437 - RNA, 20 nt, synthetic construct
  source 1..20: mol_type = other RNA
ccgactttggcctggcccga

SEQ ID NO: 4438 - RNA, 20 nt, synthetic construct
  source 1..20: mol_type = other RNA
caccgactttggcctggccc

SEQ ID NO: 4439 - RNA, 20 nt, synthetic construct
  source 1..20: mol_type = other RNA
atcaccgactttggcctggc

SEQ ID NO: 4440 - RNA, 20 nt, synthetic construct
  source 1..20: mol_type = other RNA
gtgatctcaagtccaacaac

SEQ ID NO: 4441 - RNA, 20 nt, synthetic construct
  source 1..20: mol_type = other RNA
cgtgatctcaagtccaacaa

SEQ ID NO: 4442 - RNA, 20 nt, synthetic construct
  source 1..20: mol_type = other RNA
ccgtgatctcaagtccaaca

SEQ ID NO: 4443 - RNA, 20 nt, synthetic construct
  source 1..20: mol_type = other RNA
accgtgatctcaagtccaac

SEQ ID NO: 4444 - RNA, 20 nt, synthetic construct
  source 1..20: mol_type = other RNA
caccgtgatctcaagtccaa

SEQ ID NO: 4445 - RNA, 20 nt, synthetic construct
  source 1..20: mol_type = other RNA
aacaacagtgagtttctggg

SEQ ID NO: 4446 - RNA, 20 nt, synthetic construct
  source 1..20: mol_type = other RNA
caacaacagtgagtttctgg

SEQ ID NO: 4447 - RNA, 20 nt, synthetic construct
  source 1..20: mol_type = other RNA
ccaacaacagtgagtttctg

SEQ ID NO: 4448 - RNA, 20 nt, synthetic construct
  source 1..20: mol_type = other RNA
tccaacaacagtgagtttct

SEQ ID NO: 4449 - RNA, 20 nt, synthetic construct
  source 1..20: mol_type = other RNA
gtccaacaacagtgagtttc

SEQ ID NO: 4450 - RNA, 20 nt, synthetic construct
  source 1..20: mol_type = other RNA
acaacagtgagtttctgggg

SEQ ID NO: 4451 - RNA, 20 nt, synthetic construct
  source 1..20: mol_type = other RNA
gctgtgaaggcagctcgcca

SEQ ID NO: 4452 - RNA, 20 nt, synthetic construct
  source 1..20: mol_type = other RNA
ggctgtgaaggcagctcgcc

SEQ ID NO: 4453 - RNA, 20 nt, synthetic construct
  source 1..20: mol_type = other RNA
tgaaggcagctcgccaggac

SEQ ID NO: 4454 - RNA, 20 nt, synthetic construct
  source 1..20: mol_type = other RNA
gtgaaggcagctcgccagga

SEQ ID NO: 4455 - RNA, 20 nt, synthetic construct
  source 1..20: mol_type = other RNA
tgtgaaggcagctcgccagg

SEQ ID NO: 4456 - RNA, 20 nt, synthetic construct
  source 1..20: mol_type = other RNA
ctgtgaaggcagctcgccag

SEQ ID NO: 4457 - RNA, 20 nt, synthetic construct
  source 1..20: mol_type = other RNA
gggatctcaagtcacccaag

SEQ ID NO: 4458 - RNA, 20 nt, synthetic construct
  source 1..20: mol_type = other RNA
cagggatctcaagtcaccca

SEQ ID NO: 4459 - RNA, 20 nt, synthetic construct
  source 1..20: mol_type = other RNA
agggatctcaagtcacccaa

SEQ ID NO: 4460 - RNA, 20 nt, synthetic construct
  source 1..20: mol_type = other RNA
acagggatctcaagtcaccc

SEQ ID NO: 4461 - RNA, 20 nt, synthetic construct
  source 1..20: mol_type = other RNA
cacagggatctcaagtcacc

SEQ ID NO: 4462 - RNA, 20 nt, synthetic construct
  source 1..20: mol_type = other RNA
ccaagtgagtaagcaagcag

SEQ ID NO: 4463 - RNA, 20 nt, synthetic construct
  source 1..20: mol_type = other RNA
cccaagtgagtaagcaagca

SEQ ID NO: 4464 - RNA, 20 nt, synthetic construct
  source 1..20: mol_type = other RNA
acccaagtgagtaagcaagc

SEQ ID NO: 4465 - RNA, 20 nt, synthetic construct
  source 1..20: mol_type = other RNA
gtcacccaagtgagtaagca

SEQ ID NO: 4466 - RNA, 20 nt, synthetic construct
  source 1..20: mol_type = other RNA
cacccaagtgagtaagcaag

SEQ ID NO: 4467 - RNA, 20 nt, synthetic construct
  source 1..20: mol_type = other RNA
tcacccaagtgagtaagcaa

SEQ ID NO: 4468 - RNA, 20 nt, synthetic construct
  source 1..20: mol_type = other RNA
tgaagaaggtgcgagacctc

SEQ ID NO: 4469 - RNA, 20 nt, synthetic construct
  source 1..20: mol_type = other RNA
gtgaagaaggtgcgagacct

SEQ ID NO: 4470 - RNA, 20 nt, synthetic construct
  source 1..20: mol_type = other RNA
tgtgaagaaggtgcgagacc

SEQ ID NO: 4471 - RNA, 20 nt, synthetic construct
  source 1..20: mol_type = other RNA
ctgtgaagaaggtgcgagac

SEQ ID NO: 4472 - RNA, 20 nt, synthetic construct
  source 1..20: mol_type = other RNA
gctgtgaagaaggtgcgaga

SEQ ID NO: 4473 - RNA, 20 nt, synthetic construct
  source 1..20: mol_type = other RNA
ggctgtgaagaaggtgcgag

SEQ ID NO: 4474 - RNA, 20 nt, synthetic construct
  source 1..20: mol_type = other RNA
tcgtgatctcaaatcaccta

SEQ ID NO: 4475 - RNA, 20 nt, synthetic construct
  source 1..20: mol_type = other RNA
gtgatctcaaatcacctaag

SEQ ID NO: 4476 - RNA, 20 nt, synthetic construct
  source 1..20: mol_type = other RNA
catcgtgatctcaaatcacc

SEQ ID NO: 4477 - RNA, 20 nt, synthetic construct
  source 1..20: mol_type = other RNA
atcgtgatctcaaatcacct

SEQ ID NO: 4478 - RNA, 20 nt, synthetic construct
  source 1..20: mol_type = other RNA
cgtgatctcaaatcacctaa

SEQ ID NO: 4479 - RNA, 20 nt, synthetic construct
  source 1..20: mol_type = other RNA
atcacctaagtgagttctgg

SEQ ID NO: 4480 - RNA, 20 nt, synthetic construct
  source 1..20: mol_type = other RNA
tcacctaagtgagttctggg

SEQ ID NO: 4481 - RNA, 20 nt, synthetic construct
  source 1..20: mol_type = other RNA
cacctaagtgagttctgggg

SEQ ID NO: 4482 - RNA, 20 nt, synthetic construct
  source 1..20: mol_type = other RNA
acctaagtgagttctggggc

SEQ ID NO: 4483 - RNA, 20 nt, synthetic construct
  source 1..20: mol_type = other RNA
cctaagtgagttctggggct

SEQ ID NO: 4484 - RNA, 20 nt, synthetic construct
  source 1..20: mol_type = other RNA
ctaagtgagttctggggcta

SEQ ID NO: 4485 - RNA, 20 nt, synthetic construct
  source 1..20: mol_type = other RNA
catcaagaaagtgagagaac

SEQ ID NO: 4486 - RNA, 20 nt, synthetic construct
  source 1..20: mol_type = other RNA
ggccatcaagaaagtgagag

SEQ ID NO: 4487 - RNA, 20 nt, synthetic construct
  source 1..20: mol_type = other RNA
gccatcaagaaagtgagaga

SEQ ID NO: 4488 - RNA, 20 nt, synthetic construct
  source 1..20: mol_type = other RNA
ccatcaagaaagtgagagaa

SEQ ID NO: 4489 - RNA, 20 nt, synthetic construct
  source 1..20: mol_type = other RNA
atcaagaaagtgagagaaca

SEQ ID NO: 4490 - RNA, 20 nt, synthetic construct
  source 1..20: mol_type = other RNA
tcaagaaagtgagagaacag

SEQ ID NO: 4491 - RNA, 20 nt, synthetic construct
  source 1..20: mol_type = other RNA
gtgactttggccatgctgtg

SEQ ID NO: 4492 - RNA, 20 nt, synthetic construct
  source 1..20: mol_type = other RNA
ctgtgactttggccatgctg

SEQ ID NO: 4493 - RNA, 20 nt, synthetic construct
  source 1..20: mol_type = other RNA
ctctgtgactttggccatgc

SEQ ID NO: 4494 - RNA, 20 nt, synthetic construct
  source 1..20: mol_type = other RNA
tgtgactttggccatgctgt

SEQ ID NO: 4495 - RNA, 20 nt, synthetic construct
  source 1..20: mol_type = other RNA
tctgtgactttggccatgct

SEQ ID NO: 4496 - RNA, 20 nt, synthetic construct
  source 1..20: mol_type = other RNA
catggggacgtcaaaggtaa

SEQ ID NO: 4497 - RNA, 20 nt, synthetic construct
  source 1..20: mol_type = other RNA
gggacgtcaaaggtaaggcc

SEQ ID NO: 4498 - RNA, 20 nt, synthetic construct
  source 1..20: mol_type = other RNA
ggggacgtcaaaggtaaggc

SEQ ID NO: 4499 - RNA, 20 nt, synthetic construct
  source 1..20: mol_type = other RNA
tggggacgtcaaaggtaagg

SEQ ID NO: 4500 - RNA, 20 nt, synthetic construct
  source 1..20: mol_type = other RNA
atggggacgtcaaaggtaag

SEQ ID NO: 4501 - RNA, 20 nt, synthetic construct
  source 1..20: mol_type = other RNA
gacaacgtgctcctgtccag

SEQ ID NO: 4502 - RNA, 20 nt, synthetic construct
  source 1..20: mol_type = other RNA
ctgacaacgtgctcctgtcc

SEQ ID NO: 4503 - RNA, 20 nt, synthetic construct
  source 1..20: mol_type = other RNA
acaacgtgctcctgtccagc

SEQ ID NO: 4504 - RNA, 20 nt, synthetic construct
  source 1..20: mol_type = other RNA
tgacaacgtgctcctgtcca

SEQ ID NO: 4505 - RNA, 20 nt, synthetic construct
  source 1..20: mol_type = other RNA
gctgacaacgtgctcctgtc

SEQ ID NO: 4506 - RNA, 20 nt, synthetic construct
  source 1..20: mol_type = other RNA
agctgacaacgtgctcctgt

SEQ ID NO: 4507 - RNA, 20 nt, synthetic construct
  source 1..20: mol_type = other RNA
cacagagacataaaggtact

SEQ ID NO: 4508 - RNA, 20 nt, synthetic construct
  source 1..20: mol_type = other RNA
gagacataaaggtacttgct

SEQ ID NO: 4509 - RNA, 20 nt, synthetic construct
  source 1..20: mol_type = other RNA
agagacataaaggtacttgc

SEQ ID NO: 4510 - RNA, 20 nt, synthetic construct
  source 1..20: mol_type = other RNA
cagagacataaaggtacttg

SEQ ID NO: 4511 - RNA, 20 nt, synthetic construct
  source 1..20: mol_type = other RNA
acagagacataaaggtactt

SEQ ID NO: 4512 - RNA, 20 nt, synthetic construct
  source 1..20: mol_type = other RNA
ataatgttctggtgaacacc

SEQ ID NO: 4513 - RNA, 20 nt, synthetic construct
  source 1..20: mol_type = other RNA
gataatgttctggtgaacac

SEQ ID NO: 4514 - RNA, 20 nt, synthetic construct
  source 1..20: mol_type = other RNA
cgataatgttctggtgaaca

SEQ ID NO: 4515 - RNA, 20 nt, synthetic construct
  source 1..20: mol_type = other RNA
gcgataatgttctggtgaac

SEQ ID NO: 4516 - RNA, 20 nt, synthetic construct
  source 1..20: mol_type = other RNA
ggcgataatgttctggtgaa

SEQ ID NO: 4517 - RNA, 20 nt, synthetic construct
  source 1..20: mol_type = other RNA
gggcgataatgttctggtga

SEQ ID NO: 4518 - RNA, 20 nt, synthetic construct
  source 1..20: mol_type = other RNA
atcaaagaaatcccggagag

SEQ ID NO: 4519 - RNA, 20 nt, synthetic construct
  source 1..20: mol_type = other RNA
ccatcaaagaaatcccggag

SEQ ID NO: 4520 - RNA, 20 nt, synthetic construct
  source 1..20: mol_type = other RNA
agccatcaaagaaatcccgg

SEQ ID NO: 4521 - RNA, 20 nt, synthetic construct
  source 1..20: mol_type = other RNA
caaagaaatcccggagagag

SEQ ID NO: 4522 - RNA, 20 nt, synthetic construct
  source 1..20: mol_type = other RNA
tcaaagaaatcccggagaga

SEQ ID NO: 4523 - RNA, 20 nt, synthetic construct
  source 1..20: mol_type = other RNA
catcaaagaaatcccggaga

SEQ ID NO: 4524 - RNA, 20 nt, synthetic construct
  source 1..20: mol_type = other RNA
gccatcaaagaaatcccgga

SEQ ID NO: 4525 - RNA, 20 nt, synthetic construct
  source 1..20: mol_type = other RNA
ttgactttggctgtgccagg

SEQ ID NO: 4526 - RNA, 20 nt, synthetic construct
  source 1..20: mol_type = other RNA
gattgactttggctgtgcca

SEQ ID NO: 4527 - RNA, 20 nt, synthetic construct
  source 1..20: mol_type = other RNA
tgattgactttggctgtgcc

SEQ ID NO: 4528 - RNA, 20 nt, synthetic construct
  source 1..20: mol_type = other RNA
attgactttggctgtgccag

SEQ ID NO: 4529 - RNA, 20 nt, synthetic construct
  source 1..20: mol_type = other RNA
ctgattgactttggctgtgc

SEQ ID NO: 4530 - RNA, 20 nt, synthetic construct
  source 1..20: mol_type = other RNA
cgcgatatcaaaggaaataa

SEQ ID NO: 4531 - RNA, 20 nt, synthetic construct
  source 1..20: mol_type = other RNA
gcgatatcaaaggaaataat

SEQ ID NO: 4532 - RNA, 20 nt, synthetic construct
  source 1..20: mol_type = other RNA
tcgcgatatcaaaggaaata

SEQ ID NO: 4533 - RNA, 20 nt, synthetic construct
  source 1..20: mol_type = other RNA
atcgcgatatcaaaggaaat

SEQ ID NO: 4534 - RNA, 20 nt, synthetic construct
  source 1..20: mol_type = other RNA
catcgcgatatcaaaggaaa

SEQ ID NO: 4535 - RNA, 20 nt, synthetic construct
  source 1..20: mol_type = other RNA
aggaaataatgttatgctca

SEQ ID NO: 4536 - RNA, 20 nt, synthetic construct
  source 1..20: mol_type = other RNA
ataatgttatgctcatgcca

SEQ ID NO: 4537 - RNA, 20 nt, synthetic construct
  source 1..20: mol_type = other RNA
aataatgttatgctcatgcc

SEQ ID NO: 4538 - RNA, 20 nt, synthetic construct
  source 1..20: mol_type = other RNA
aaataatgttatgctcatgc

SEQ ID NO: 4539 - RNA, 20 nt, synthetic construct
  source 1..20: mol_type = other RNA
gaaataatgttatgctcatg

SEQ ID NO: 4540 - RNA, 20 nt, synthetic construct
  source 1..20: mol_type = other RNA
ggaaataatgttatgctcat

SEQ ID NO: 4541 - RNA, 20 nt, synthetic construct
  source 1..20: mol_type = other RNA
gctgtaaaacaggtggcttt

SEQ ID NO: 4542 - RNA, 20 nt, synthetic construct
  source 1..20: mol_type = other RNA
agctgtaaaacaggtggctt

SEQ ID NO: 4543 - RNA, 20 nt, synthetic construct
  source 1..20: mol_type = other RNA
aaaacaggtggctttggata

SEQ ID NO: 4544 - RNA, 20 nt, synthetic construct
  source 1..20: mol_type = other RNA
taaaacaggtggctttggat

SEQ ID NO: 4545 - RNA, 20 nt, synthetic construct
  source 1..20: mol_type = other RNA
gtaaaacaggtggctttgga

SEQ ID NO: 4546 - RNA, 20 nt, synthetic construct
  source 1..20: mol_type = other RNA
tgtaaaacaggtggctttgg

SEQ ID NO: 4547 - RNA, 20 nt, synthetic construct
  source 1..20: mol_type = other RNA
ctgtaaaacaggtggctttg

SEQ ID NO: 4548 - RNA, 20 nt, synthetic construct
  source 1..20: mol_type = other RNA
gagatatcaaaggtaagtaa

SEQ ID NO: 4549 - RNA, 20 nt, synthetic construct
  source 1..20: mol_type = other RNA
agagatatcaaaggtaagta

SEQ ID NO: 4550 - RNA, 20 nt, synthetic construct
  source 1..20: mol_type = other RNA
tagagatatcaaaggtaagt

SEQ ID NO: 4551 - RNA, 20 nt, synthetic construct
  source 1..20: mol_type = other RNA
atagagatatcaaaggtaag

SEQ ID NO: 4552 - RNA, 20 nt, synthetic construct
  source 1..20: mol_type = other RNA
catagagatatcaaaggtaa

SEQ ID NO: 4553 - RNA, 20 nt, synthetic construct
  source 1..20: mol_type = other RNA
caaatatcctgcgagattca

SEQ ID NO: 4554 - RNA, 20 nt, synthetic construct
  source 1..20: mol_type = other RNA
gcaaatatcctgcgagattc

SEQ ID NO: 4555 - RNA, 20 nt, synthetic construct
  source 1..20: mol_type = other RNA
cgcaaatatcctgcgagatt

SEQ ID NO: 4556 - RNA, 20 nt, synthetic construct
  source 1..20: mol_type = other RNA
gcgcaaatatcctgcgagat

SEQ ID NO: 4557 - RNA, 20 nt, synthetic construct
  source 1..20: mol_type = other RNA
ggcgcaaatatcctgcgaga

SEQ ID NO: 4558 - RNA, 20 nt, synthetic construct
  source 1..20: mol_type = other RNA
aggcgcaaatatcctgcgag

SEQ ID NO: 4559 - RNA, 20 nt, synthetic construct
  source 1..20: mol_type = other RNA
gctgttaagcaagttcaatt

SEQ ID NO: 4560 - RNA, 20 nt, synthetic construct
  source 1..20: mol_type = other RNA
ttaagcaagttcaatttgac

SEQ ID NO: 4561 - RNA, 20 nt, synthetic construct
  source 1..20: mol_type = other RNA
gttaagcaagttcaatttga

SEQ ID NO: 4562 - RNA, 20 nt, synthetic construct
  source 1..20: mol_type = other RNA
tgttaagcaagttcaatttg

SEQ ID NO: 4563 - RNA, 20 nt, synthetic construct
  source 1..20: mol_type = other RNA
ctgttaagcaagttcaattt

SEQ ID NO: 4564 - RNA, 20 nt, synthetic construct
  source 1..20: mol_type = other RNA
ggctgttaagcaagttcaat

SEQ ID NO: 4565 - RNA, 20 nt, synthetic construct
  source 1..20: mol_type = other RNA
tctgtgactttggtgcctct

SEQ ID NO: 4566 - RNA, 20 nt, synthetic construct
  source 1..20: mol_type = other RNA
ctgtgactttggtgcctctc

SEQ ID NO: 4567 - RNA, 20 nt, synthetic construct
  source 1..20: mol_type = other RNA
atctgtgactttggtgcctc

SEQ ID NO: 4568 - RNA, 20 nt, synthetic construct
  source 1..20: mol_type = other RNA
tgtgactttggtgcctctcg

SEQ ID NO: 4569 - RNA, 20 nt, synthetic construct
  source 1..20: mol_type = other RNA
gtgactttggtgcctctcgg

SEQ ID NO: 4570 - RNA, 20 nt, synthetic construct
  source 1..20: mol_type = other RNA
agagacctcaagtcaagaaa

SEQ ID NO: 4571 - RNA, 20 nt, synthetic construct
  source 1..20: mol_type = other RNA
gagacctcaagtcaagaaac

SEQ ID NO: 4572 - RNA, 20 nt, synthetic construct
  source 1..20: mol_type = other RNA
cacagagacctcaagtcaag

SEQ ID NO: 4573 - RNA, 20 nt, synthetic construct
  source 1..20: mol_type = other RNA
acagagacctcaagtcaaga

SEQ ID NO: 4574 - RNA, 20 nt, synthetic construct
  source 1..20: mol_type = other RNA
cagagacctcaagtcaagaa

SEQ ID NO: 4575 - RNA, 20 nt, synthetic construct
  source 1..20: mol_type = other RNA
aagaaacggtaatgtagtta

SEQ ID NO: 4576 - RNA, 20 nt, synthetic construct
  source 1..20: mol_type = other RNA
gtcaagaaacggtaatgtag

SEQ ID NO: 4577 - RNA, 20 nt, synthetic construct
  source 1..20: mol_type = other RNA
tcaagaaacggtaatgtagt

SEQ ID NO: 4578 - RNA, 20 nt, synthetic construct
  source 1..20: mol_type = other RNA
caagaaacggtaatgtagtt

SEQ ID NO: 4579 - RNA, 20 nt, synthetic construct
  source 1..20: mol_type = other RNA
agaaacggtaatgtagttat

SEQ ID NO: 4580 - RNA, 20 nt, synthetic construct
  source 1..20: mol_type = other RNA
gaaacggtaatgtagttatg

SEQ ID NO: 4581 - RNA, 20 nt, synthetic construct
  source 1..20: mol_type = other RNA
gtaaagaagctcctcaaaat

SEQ ID NO: 4582 - RNA, 20 nt, synthetic construct
  source 1..20: mol_type = other RNA
ggctgtaaagaagctcctca

SEQ ID NO: 4583 - RNA, 20 nt, synthetic construct
  source 1..20: mol_type = other RNA
gctgtaaagaagctcctcaa

SEQ ID NO: 4584 - RNA, 20 nt, synthetic construct
  source 1..20: mol_type = other RNA
ctgtaaagaagctcctcaaa

SEQ ID NO: 4585 - RNA, 20 nt, synthetic construct
  source 1..20: mol_type = other RNA
tgtaaagaagctcctcaaaa

SEQ ID NO: 4586 - RNA, 20 nt, synthetic construct
  source 1..20: mol_type = other RNA
taaagaagctcctcaaaata

SEQ ID NO: 4587 - RNA, 20 nt, synthetic construct
  source 1..20: mol_type = other RNA
gggacctcaagtccagcaac

SEQ ID NO: 4588 - RNA, 20 nt, synthetic construct
  source 1..20: mol_type = other RNA
caccgggacctcaagtccag

SEQ ID NO: 4589 - RNA, 20 nt, synthetic construct
  source 1..20: mol_type = other RNA
accgggacctcaagtccagc

SEQ ID NO: 4590 - RNA, 20 nt, synthetic construct
  source 1..20: mol_type = other RNA
ccgggacctcaagtccagca

SEQ ID NO: 4591 - RNA, 20 nt, synthetic construct
  source 1..20: mol_type = other RNA
cgggacctcaagtccagcaa

SEQ ID NO: 4592 - RNA, 20 nt, synthetic construct
  source 1..20: mol_type = other RNA
cagcaacagtaagtggggcc

SEQ ID NO: 4593 - RNA, 20 nt, synthetic construct
  source 1..20: mol_type = other RNA
gcaacagtaagtggggccag

SEQ ID NO: 4594 - RNA, 20 nt, synthetic construct
  source 1..20: mol_type = other RNA
gtccagcaacagtaagtggg

SEQ ID NO: 4595 - RNA, 20 nt, synthetic construct
  source 1..20: mol_type = other RNA
tccagcaacagtaagtgggg

SEQ ID NO: 4596 - RNA, 20 nt, synthetic construct
  source 1..20: mol_type = other RNA
ccagcaacagtaagtggggc

SEQ ID NO: 4597 - RNA, 20 nt, synthetic construct
  source 1..20: mol_type = other RNA
agcaacagtaagtggggcca

SEQ ID NO: 4598 - RNA, 20 nt, synthetic construct
  source 1..20: mol_type = other RNA
ggccgtgaaggcggcgcgcc

SEQ ID NO: 4599 - RNA, 20 nt, synthetic construct
  source 1..20: mol_type = other RNA
gccgtgaaggcggcgcgcca

SEQ ID NO: 4600 - RNA, 20 nt, synthetic construct
  source 1..20: mol_type = other RNA
ccgtgaaggcggcgcgccag

SEQ ID NO: 4601 - RNA, 20 nt, synthetic construct
  source 1..20: mol_type = other RNA
cgtgaaggcggcgcgccagg

SEQ ID NO: 4602 - RNA, 20 nt, synthetic construct
  source 1..20: mol_type = other RNA
gtgaaggcggcgcgccagga

SEQ ID NO: 4603 - RNA, 20 nt, synthetic construct
  source 1..20: mol_type = other RNA
tgaaggcggcgcgccaggac

SEQ ID NO: 4604 - RNA, 20 nt, synthetic construct
  source 1..20: mol_type = other RNA
gggactttggggccagcaaa

SEQ ID NO: 4605 - RNA, 20 nt, synthetic construct
  source 1..20: mol_type = other RNA
ggggactttggggccagcaa

SEQ ID NO: 4606 - RNA, 20 nt, synthetic construct
  source 1..20: mol_type = other RNA
ccgggacattaagggtgagc

SEQ ID NO: 4607 - RNA, 20 nt, synthetic construct
  source 1..20: mol_type = other RNA
cgggacattaagggtgagca

SEQ ID NO: 4608 - RNA, 20 nt, synthetic construct
  source 1..20: mol_type = other RNA
gggacattaagggtgagcag

SEQ ID NO: 4609 - RNA, 20 nt, synthetic construct
  source 1..20: mol_type = other RNA
caccgggacattaagggtga

SEQ ID NO: 4610 - RNA, 20 nt, synthetic construct
  source 1..20: mol_type = other RNA
accgggacattaagggtgag

SEQ ID NO: 4611 - RNA, 20 nt, synthetic construct
  source 1..20: mol_type = other RNA
gccaacatcctccgagactc

SEQ ID NO: 4612 - RNA, 20 nt, synthetic construct
  source 1..20: mol_type = other RNA
aggagccaacatcctccgag

SEQ ID NO: 4613 - RNA, 20 nt, synthetic construct
  source 1..20: mol_type = other RNA
ggagccaacatcctccgaga

SEQ ID NO: 4614 - RNA, 20 nt, synthetic construct
  source 1..20: mol_type = other RNA
gagccaacatcctccgagac

SEQ ID NO: 4615 - RNA, 20 nt, synthetic construct
  source 1..20: mol_type = other RNA
agccaacatcctccgagact

SEQ ID NO: 4616 - RNA, 20 nt, synthetic construct
  source 1..20: mol_type = other RNA
ccaacatcctccgagactct

SEQ ID NO: 4617 - RNA, 20 nt, synthetic construct
  source 1..20: mol_type = other RNA
gcttccaagcaggtccaatt

SEQ ID NO: 4618 - RNA, 20 nt, synthetic construct
  source 1..20: mol_type = other RNA
tgcttccaagcaggtccaat

SEQ ID NO: 4619 - RNA, 20 nt, synthetic construct
  source 1..20: mol_type = other RNA
cttccaagcaggtccaattt

SEQ ID NO: 4620 - RNA, 20 nt, synthetic construct
  source 1..20: mol_type = other RNA
ttccaagcaggtccaatttg

SEQ ID NO: 4621 - RNA, 20 nt, synthetic construct
  source 1..20: mol_type = other RNA
tccaagcaggtccaatttga

SEQ ID NO: 4622 - RNA, 20 nt, synthetic construct
  source 1..20: mol_type = other RNA
ccaagcaggtccaatttgat

SEQ ID NO: 4623 - RNA, 20 nt, synthetic construct
  source 1..20: mol_type = other RNA
caccgtgacattaaaggtaa

SEQ ID NO: 4624 - RNA, 20 nt, synthetic construct
  source 1..20: mol_type = other RNA
accgtgacattaaaggtaat

SEQ ID NO: 4625 - RNA, 20 nt, synthetic construct
  source 1..20: mol_type = other RNA
ccgtgacattaaaggtaatc

SEQ ID NO: 4626 - RNA, 20 nt, synthetic construct
  source 1..20: mol_type = other RNA
cgtgacattaaaggtaatcc

SEQ ID NO: 4627 - RNA, 20 nt, synthetic construct
  source 1..20: mol_type = other RNA
gtgacattaaaggtaatccc

SEQ ID NO: 4628 - RNA, 20 nt, synthetic construct
  source 1..20: mol_type = other RNA
aggtgccaatatcttcctta

SEQ ID NO: 4629 - RNA, 20 nt, synthetic construct
  source 1..20: mol_type = other RNA
ggtgccaatatcttccttac

SEQ ID NO: 4630 - RNA, 20 nt, synthetic construct
  source 1..20: mol_type = other RNA
gtgccaatatcttccttacc

SEQ ID NO: 4631 - RNA, 20 nt, synthetic construct
  source 1..20: mol_type = other RNA
tgccaatatcttccttacct

SEQ ID NO: 4632 - RNA, 20 nt, synthetic construct
  source 1..20: mol_type = other RNA
gccaatatcttccttacctc

SEQ ID NO: 4633 - RNA, 20 nt, synthetic construct
  source 1..20: mol_type = other RNA
ccaatatcttccttacctca

SEQ ID NO: 4634 - RNA, 20 nt, synthetic construct
  source 1..20: mol_type = other RNA
catgaaagaggtgagtcacc

SEQ ID NO: 4635 - RNA, 20 nt, synthetic construct
  source 1..20: mol_type = other RNA
atgaaagaggtgagtcacct

SEQ ID NO: 4636 - RNA, 20 nt, synthetic construct
  source 1..20: mol_type = other RNA
ggccatgaaagaggtgagtc

SEQ ID NO: 4637 - RNA, 20 nt, synthetic construct
  source 1..20: mol_type = other RNA
gccatgaaagaggtgagtca

SEQ ID NO: 4638 - RNA, 20 nt, synthetic construct
  source 1..20: mol_type = other RNA
ccatgaaagaggtgagtcac

SEQ ID NO: 4639 - RNA, 20 nt, synthetic construct
  source 1..20: mol_type = other RNA
tgaaagaggtgagtcacctg

SEQ ID NO: 4640 - RNA, 20 nt, synthetic construct
  source 1..20: mol_type = other RNA
gaaagaggtgagtcacctgg

SEQ ID NO: 4641 - RNA, 20 nt, synthetic construct
  source 1..20: mol_type = other RNA
ctgacttcggaacatcaaag

SEQ ID NO: 4642 - RNA, 20 nt, synthetic construct
  source 1..20: mol_type = other RNA
ctctgacttcggaacatcaa

SEQ ID NO: 4643 - RNA, 20 nt, synthetic construct
  source 1..20: mol_type = other RNA
tctgacttcggaacatcaaa

SEQ ID NO: 4644 - RNA, 20 nt, synthetic construct
  source 1..20: mol_type = other RNA
tctctgacttcggaacatca

SEQ ID NO: 4645 - RNA, 20 nt, synthetic construct
  source 1..20: mol_type = other RNA
atctctgacttcggaacatc

SEQ ID NO: 4646 - RNA, 20 nt, synthetic construct
  source 1..20: mol_type = other RNA
gggacataaaggtgaggtac

SEQ ID NO: 4647 - RNA, 20 nt, synthetic construct
  source 1..20: mol_type = other RNA
cgggacataaaggtgaggta

SEQ ID NO: 4648 - RNA, 20 nt, synthetic construct
  source 1..20: mol_type = other RNA
ccgggacataaaggtgaggt

SEQ ID NO: 4649 - RNA, 20 nt, synthetic construct
  source 1..20: mol_type = other RNA
accgggacataaaggtgagg

SEQ ID NO: 4650 - RNA, 20 nt, synthetic construct
  source 1..20: mol_type = other RNA
caccgggacataaaggtgag

SEQ ID NO: 4651 - RNA, 20 nt, synthetic construct
  source 1..20: mol_type = other RNA
acaatgtgttgattaatacc

SEQ ID NO: 4652 - RNA, 20 nt, synthetic construct
  source 1..20: mol_type = other RNA
gacaatgtgttgattaatac

SEQ ID NO: 4653 - RNA, 20 nt, synthetic construct
  source 1..20: mol_type = other RNA
tgacaatgtgttgattaata

SEQ ID NO: 4654 - RNA, 20 nt, synthetic construct
  source 1..20: mol_type = other RNA
gtgacaatgtgttgattaat

SEQ ID NO: 4655 - RNA, 20 nt, synthetic construct
  source 1..20: mol_type = other RNA
ggtgacaatgtgttgattaa

SEQ ID NO: 4656 - RNA, 20 nt, synthetic construct
  source 1..20: mol_type = other RNA
gggtgacaatgtgttgatta

SEQ ID NO: 4657 - RNA, 20 nt, synthetic construct
  source 1..20: mol_type = other RNA
attaaggaaatcccagagag

SEQ ID NO: 4658 - RNA, 20 nt, synthetic construct
  source 1..20: mol_type = other RNA
ctattaaggaaatcccagag

SEQ ID NO: 4659 - RNA, 20 nt, synthetic construct
  source 1..20: mol_type = other RNA
tgctattaaggaaatcccag

SEQ ID NO: 4660 - RNA, 20 nt, synthetic construct
  source 1..20: mol_type = other RNA
ttaaggaaatcccagagaga

SEQ ID NO: 4661 - RNA, 20 nt, synthetic construct
  source 1..20: mol_type = other RNA
tattaaggaaatcccagaga

SEQ ID NO: 4662 - RNA, 20 nt, synthetic construct
  source 1..20: mol_type = other RNA
gctattaaggaaatcccaga

SEQ ID NO: 4663 - RNA, 20 nt, synthetic construct
  source 1..20: mol_type = other RNA
ctgacttcggcacctccaag

SEQ ID NO: 4664 - RNA, 20 nt, synthetic construct
  source 1..20: mol_type = other RNA
ttctgacttcggcacctcca

SEQ ID NO: 4665 - RNA, 20 nt, synthetic construct
  source 1..20: mol_type = other RNA
tctgacttcggcacctccaa

SEQ ID NO: 4666 - RNA, 20 nt, synthetic construct
  source 1..20: mol_type = other RNA
tttctgacttcggcacctcc

SEQ ID NO: 4667 - RNA, 20 nt, synthetic construct
  source 1..20: mol_type = other RNA
atttctgacttcggcacctc

SEQ ID NO: 4668 - RNA, 20 nt, synthetic construct
  source 1..20: mol_type = other RNA
gggacataaaagtaagccct

SEQ ID NO: 4669 - RNA, 20 nt, synthetic construct
  source 1..20: mol_type = other RNA
agggacataaaagtaagccc

SEQ ID NO: 4670 - RNA, 20 nt, synthetic construct
  source 1..20: mol_type = other RNA
cagggacataaaagtaagcc

SEQ ID NO: 4671 - RNA, 20 nt, synthetic construct
  source 1..20: mol_type = other RNA
acagggacataaaagtaagc

SEQ ID NO: 4672 - RNA, 20 nt, synthetic construct
  source 1..20: mol_type = other RNA
cacagggacataaaagtaag

SEQ ID NO: 4673 - RNA, 20 nt, synthetic construct
  source 1..20: mol_type = other RNA
acaatgtgctgatcaacacc

SEQ ID NO: 4674 - RNA, 20 nt, synthetic construct
  source 1..20: mol_type = other RNA
gacaatgtgctgatcaacac

SEQ ID NO: 4675 - RNA, 20 nt, synthetic construct
  source 1..20: mol_type = other RNA
ggacaatgtgctgatcaaca

SEQ ID NO: 4676 - RNA, 20 nt, synthetic construct
  source 1..20: mol_type = other RNA
gggacaatgtgctgatcaac

SEQ ID NO: 4677 - RNA, 20 nt, synthetic construct
  source 1..20: mol_type = other RNA
ggggacaatgtgctgatcaa

SEQ ID NO: 4678 - RNA, 20 nt, synthetic construct
  source 1..20: mol_type = other RNA
atcaaggagatcccggagcg

SEQ ID NO: 4679 - RNA, 20 nt, synthetic construct
  source 1..20: mol_type = other RNA
catcaaggagatcccggagc

SEQ ID NO: 4680 - RNA, 20 nt, synthetic construct
  source 1..20: mol_type = other RNA
ccatcaaggagatcccggag

SEQ ID NO: 4681 - RNA, 20 nt, synthetic construct
  source 1..20: mol_type = other RNA
cgccatcaaggagatcccgg

SEQ ID NO: 4682 - RNA, 20 nt, synthetic construct
  source 1..20: mol_type = other RNA
tcaaggagatcccggagcgg

SEQ ID NO: 4683 - RNA, 20 nt, synthetic construct
  source 1..20: mol_type = other RNA
gccatcaaggagatcccgga

SEQ ID NO: 4684 - RNA, 20 nt, synthetic construct
  source 1..20: mol_type = other RNA
cagggacctgaaaccaccaa

SEQ ID NO: 4685 - RNA, 20 nt, synthetic construct
  source 1..20: mol_type = other RNA
gggacctgaaaccaccaaag

SEQ ID NO: 4686 - RNA, 20 nt, synthetic construct
  source 1..20: mol_type = other RNA
agggacctgaaaccaccaaa

SEQ ID NO: 4687 - RNA, 20 nt, synthetic construct
  source 1..20: mol_type = other RNA
acagggacctgaaaccacca

SEQ ID NO: 4688 - RNA, 20 nt, synthetic construct
  source 1..20: mol_type = other RNA
cacagggacctgaaaccacc

SEQ ID NO: 4689 - RNA, 20 nt, synthetic construct
  source 1..20: mol_type = other RNA
caaagtaagttataataatg

SEQ ID NO: 4690 - RNA, 20 nt, synthetic construct
  source 1..20: mol_type = other RNA
accaaagtaagttataataa

SEQ ID NO: 4691 - RNA, 20 nt, synthetic construct
  source 1..20: mol_type = other RNA
ccaaagtaagttataataat

SEQ ID NO: 4692 - RNA, 20 nt, synthetic construct
  source 1..20: mol_type = other RNA
caccaaagtaagttataata

SEQ ID NO: 4693 - RNA, 20 nt, synthetic construct
  source 1..20: mol_type = other RNA
ccaccaaagtaagttataat

SEQ ID NO: 4694 - RNA, 20 nt, synthetic construct
  source 1..20: mol_type = other RNA
accaccaaagtaagttataa

SEQ ID NO: 4695 - RNA, 20 nt, synthetic construct
  source 1..20: mol_type = other RNA
gctattaaacaaatagaaag

SEQ ID NO: 4696 - RNA, 20 nt, synthetic construct
  source 1..20: mol_type = other RNA
taaacaaatagaaagtgaat

SEQ ID NO: 4697 - RNA, 20 nt, synthetic construct
  source 1..20: mol_type = other RNA
ttaaacaaatagaaagtgaa

SEQ ID NO: 4698 - RNA, 20 nt, synthetic construct
  source 1..20: mol_type = other RNA
attaaacaaatagaaagtga

SEQ ID NO: 4699 - RNA, 20 nt, synthetic construct
  source 1..20: mol_type = other RNA
tattaaacaaatagaaagtg

SEQ ID NO: 4700 - RNA, 20 nt, synthetic construct
  source 1..20: mol_type = other RNA
ctattaaacaaatagaaagt

SEQ ID NO: 4701 - RNA, 20 nt, synthetic construct
  source 1..20: mol_type = other RNA
tgctattaaacaaatagaaa

SEQ ID NO: 4702 - RNA, 20 nt, synthetic construct
  source 1..20: mol_type = other RNA
catcatgatattaaacgtaa

SEQ ID NO: 4703 - RNA, 20 nt, synthetic construct
  source 1..20: mol_type = other RNA
atcatgatattaaacgtaag

SEQ ID NO: 4704 - RNA, 20 nt, synthetic construct
  source 1..20: mol_type = other RNA
tcatgatattaaacgtaagt

SEQ ID NO: 4705 - RNA, 20 nt, synthetic construct
  source 1..20: mol_type = other RNA
catgatattaaacgtaagta

SEQ ID NO: 4706 - RNA, 20 nt, synthetic construct
  source 1..20: mol_type = other RNA
atgatattaaacgtaagtat

SEQ ID NO: 4707 - RNA, 20 nt, synthetic construct
  source 1..20: mol_type = other RNA
ggcgtgtaaactggtatgtg

SEQ ID NO: 4708 - RNA, 20 nt, synthetic construct
  source 1..20: mol_type = other RNA
gcgtgtaaactggtatgtgt

SEQ ID NO: 4709 - RNA, 20 nt, synthetic construct
  source 1..20: mol_type = other RNA
cgtgtaaactggtatgtgtt

SEQ ID NO: 4710 - RNA, 20 nt, synthetic construct
  source 1..20: mol_type = other RNA
gtgtaaactggtatgtgttt

SEQ ID NO: 4711 - RNA, 20 nt, synthetic construct
  source 1..20: mol_type = other RNA
gcgaccttaagtccagcaac

SEQ ID NO: 4712 - RNA, 20 nt, synthetic construct
  source 1..20: mol_type = other RNA
cgcgaccttaagtccagcaa

SEQ ID NO: 4713 - RNA, 20 nt, synthetic construct
  source 1..20: mol_type = other RNA
ccgcgaccttaagtccagca

SEQ ID NO: 4714 - RNA, 20 nt, synthetic construct
  source 1..20: mol_type = other RNA
accgcgaccttaagtccagc

SEQ ID NO: 4715 - RNA, 20 nt, synthetic construct
  source 1..20: mol_type = other RNA
caccgcgaccttaagtccag

SEQ ID NO: 4716 - RNA, 20 nt, synthetic construct
  source 1..20: mol_type = other RNA
cagcaacagtgagtatgaag

SEQ ID NO: 4717 - RNA, 20 nt, synthetic construct
  source 1..20: mol_type = other RNA
tccagcaacagtgagtatga

SEQ ID NO: 4718 - RNA, 20 nt, synthetic construct
  source 1..20: mol_type = other RNA
gcaacagtgagtatgaagag

SEQ ID NO: 4719 - RNA, 20 nt, synthetic construct
  source 1..20: mol_type = other RNA
agcaacagtgagtatgaaga

SEQ ID NO: 4720 - RNA, 20 nt, synthetic construct
  source 1..20: mol_type = other RNA
ccagcaacagtgagtatgaa

SEQ ID NO: 4721 - RNA, 20 nt, synthetic construct
  source 1..20: mol_type = other RNA
gtccagcaacagtgagtatg

SEQ ID NO: 4722 - RNA, 20 nt, synthetic construct
  source 1..20: mol_type = other RNA
gctgtgaaagcagctcgcca

SEQ ID NO: 4723 - RNA, 20 nt, synthetic construct
  source 1..20: mol_type = other RNA
gaaagcagctcgccacgacc

SEQ ID NO: 4724 - RNA, 20 nt, synthetic construct
  source 1..20: mol_type = other RNA
tgaaagcagctcgccacgac

SEQ ID NO: 4725 - RNA, 20 nt, synthetic construct
  source 1..20: mol_type = other RNA
gtgaaagcagctcgccacga

SEQ ID NO: 4726 - RNA, 20 nt, synthetic construct
  source 1..20: mol_type = other RNA
tgtgaaagcagctcgccacg

SEQ ID NO: 4727 - RNA, 20 nt, synthetic construct
  source 1..20: mol_type = other RNA
ctgtgaaagcagctcgccac

SEQ ID NO: 4728 - RNA, 20 nt, synthetic construct
  source 1..20: mol_type = other RNA
tgctgtgaaagcagctcgcc

SEQ ID NO: 4729 - RNA, 20 nt, synthetic construct
  source 1..20: mol_type = other RNA
ccagctgactttggcatctc

SEQ ID NO: 4730 - RNA, 20 nt, synthetic construct
  source 1..20: mol_type = other RNA
ctgactttggcatctcggcc

SEQ ID NO: 4731 - RNA, 20 nt, synthetic construct
  source 1..20: mol_type = other RNA
gctgactttggcatctcggc

SEQ ID NO: 4732 - RNA, 20 nt, synthetic construct
  source 1..20: mol_type = other RNA
agctgactttggcatctcgg

SEQ ID NO: 4733 - RNA, 20 nt, synthetic construct
  source 1..20: mol_type = other RNA
cagctgactttggcatctcg

SEQ ID NO: 4734 - RNA, 20 nt, synthetic construct
  source 1..20: mol_type = other RNA
gggacatcaaggtggtctgg

SEQ ID NO: 4735 - RNA, 20 nt, synthetic construct
  source 1..20: mol_type = other RNA
agggacatcaaggtggtctg

SEQ ID NO: 4736 - RNA, 20 nt, synthetic construct
  source 1..20: mol_type = other RNA
cagggacatcaaggtggtct

SEQ ID NO: 4737 - RNA, 20 nt, synthetic construct
  source 1..20: mol_type = other RNA
acagggacatcaaggtggtc

SEQ ID NO: 4738 - RNA, 20 nt, synthetic construct
  source 1..20: mol_type = other RNA
cacagggacatcaaggtggt

SEQ ID NO: 4739 - RNA, 20 nt, synthetic construct
  source 1..20: mol_type = other RNA
gctaacatcctcatcaatga

SEQ ID NO: 4740 - RNA, 20 nt, synthetic construct
  source 1..20: mol_type = other RNA
ggagctaacatcctcatcaa

SEQ ID NO: 4741 - RNA, 20 nt, synthetic construct
  source 1..20: mol_type = other RNA
ctaacatcctcatcaatgat

SEQ ID NO: 4742 - RNA, 20 nt, synthetic construct
  source 1..20: mol_type = other RNA
agctaacatcctcatcaatg

SEQ ID NO: 4743 - RNA, 20 nt, synthetic construct
  source 1..20: mol_type = other RNA
gagctaacatcctcatcaat

SEQ ID NO: 4744 - RNA, 20 nt, synthetic construct
  source 1..20: mol_type = other RNA
gggagctaacatcctcatca

SEQ ID NO: 4745 - RNA, 20 nt, synthetic construct
  source 1..20: mol_type = other RNA
actgaagatggtgaagatgg

SEQ ID NO: 4746 - RNA, 20 nt, synthetic construct
  source 1..20: mol_type = other RNA
gcactgaagatggtgaagat

SEQ ID NO: 4747 - RNA, 20 nt, synthetic construct
  source 1..20: mol_type = other RNA
ggcactgaagatggtgaaga

SEQ ID NO: 4748 - RNA, 20 nt, synthetic construct
  source 1..20: mol_type = other RNA
tgaagatggtgaagatggag

SEQ ID NO: 4749 - RNA, 20 nt, synthetic construct
  source 1..20: mol_type = other RNA
ctgaagatggtgaagatgga

SEQ ID NO: 4750 - RNA, 20 nt, synthetic construct
  source 1..20: mol_type = other RNA
cactgaagatggtgaagatg

SEQ ID NO: 4751 - RNA, 20 nt, synthetic construct
  source 1..20: mol_type = other RNA
gctgactttggggtgtcagg

SEQ ID NO: 4752 - RNA, 20 nt, synthetic construct
  source 1..20: mol_type = other RNA
cagctgactttggggtgtca

SEQ ID NO: 4753 - RNA, 20 nt, synthetic construct
  source 1..20: mol_type = other RNA
acagctgactttggggtgtc

SEQ ID NO: 4754 - RNA, 20 nt, synthetic construct
  source 1..20: mol_type = other RNA
ctgactttggggtgtcaggc

SEQ ID NO: 4755 - RNA, 20 nt, synthetic construct
  source 1..20: mol_type = other RNA
agctgactttggggtgtcag

SEQ ID NO: 4756 - RNA, 20 nt, synthetic construct
  source 1..20: mol_type = other RNA
gagacatcaaggtaggcacc

SEQ ID NO: 4757 - RNA, 20 nt, synthetic construct
  source 1..20: mol_type = other RNA
agagacatcaaggtaggcac

SEQ ID NO: 4758 - RNA, 20 nt, synthetic construct
  source 1..20: mol_type = other RNA
cagagacatcaaggtaggca

SEQ ID NO: 4759 - RNA, 20 nt, synthetic construct
  source 1..20: mol_type = other RNA
acagagacatcaaggtaggc

SEQ ID NO: 4760 - RNA, 20 nt, synthetic construct
  source 1..20: mol_type = other RNA
cacagagacatcaaggtagg

SEQ ID NO: 4761 - RNA, 20 nt, synthetic construct
  source 1..20: mol_type = other RNA
ccaaccttctcctcactctc

SEQ ID NO: 4762 - RNA, 20 nt, synthetic construct
  source 1..20: mol_type = other RNA
gccaaccttctcctcactct

SEQ ID NO: 4763 - RNA, 20 nt, synthetic construct
  source 1..20: mol_type = other RNA
agccaaccttctcctcactc

SEQ ID NO: 4764 - RNA, 20 nt, synthetic construct
  source 1..20: mol_type = other RNA
gagccaaccttctcctcact

SEQ ID NO: 4765 - RNA, 20 nt, synthetic construct
  source 1..20: mol_type = other RNA
ggagccaaccttctcctcac

SEQ ID NO: 4766 - RNA, 20 nt, synthetic construct
  source 1..20: mol_type = other RNA
gggagccaaccttctcctca

SEQ ID NO: 4767 - RNA, 20 nt, synthetic construct
  source 1..20: mol_type = other RNA
gccgtgaagatagtcaagct

SEQ ID NO: 4768 - RNA, 20 nt, synthetic construct
  source 1..20: mol_type = other RNA
tgaagatagtcaagctagac

SEQ ID NO: 4769 - RNA, 20 nt, synthetic construct
  source 1..20: mol_type = other RNA
gtgaagatagtcaagctaga

SEQ ID NO: 4770 - RNA, 20 nt, synthetic construct
  source 1..20: mol_type = other RNA
cgtgaagatagtcaagctag

SEQ ID NO: 4771 - RNA, 20 nt, synthetic construct
  source 1..20: mol_type = other RNA
ccgtgaagatagtcaagcta

SEQ ID NO: 4772 - RNA, 20 nt, synthetic construct
  source 1..20: mol_type = other RNA
cgccgtgaagatagtcaagc

SEQ ID NO: 4773 - RNA, 20 nt, synthetic construct
  source 1..20: mol_type = other RNA
gagatataaaggtatacatt

SEQ ID NO: 4774 - RNA, 20 nt, synthetic construct
  source 1..20: mol_type = other RNA
agagatataaaggtatacat

SEQ ID NO: 4775 - RNA, 20 nt, synthetic construct
  source 1..20: mol_type = other RNA
cagagatataaaggtataca

SEQ ID NO: 4776 - RNA, 20 nt, synthetic construct
  source 1..20: mol_type = other RNA
acagagatataaaggtatac

SEQ ID NO: 4777 - RNA, 20 nt, synthetic construct
  source 1..20: mol_type = other RNA
cacagagatataaaggtata

SEQ ID NO: 4778 - RNA, 20 nt, synthetic construct
  source 1..20: mol_type = other RNA
ggagctaacattctattaac

SEQ ID NO: 4779 - RNA, 20 nt, synthetic construct
  source 1..20: mol_type = other RNA
gggagctaacattctattaa

SEQ ID NO: 4780 - RNA, 20 nt, synthetic construct
  source 1..20: mol_type = other RNA
ctaacattctattaacggat

SEQ ID NO: 4781 - RNA, 20 nt, synthetic construct
  source 1..20: mol_type = other RNA
gctaacattctattaacgga

SEQ ID NO: 4782 - RNA, 20 nt, synthetic construct
  source 1..20: mol_type = other RNA
agctaacattctattaacgg

SEQ ID NO: 4783 - RNA, 20 nt, synthetic construct
  source 1..20: mol_type = other RNA
gagctaacattctattaacg

SEQ ID NO: 4784 - RNA, 20 nt, synthetic construct
  source 1..20: mol_type = other RNA
gcaattaaagtaataaaatt

SEQ ID NO: 4785 - RNA, 20 nt, synthetic construct
  source 1..20: mol_type = other RNA
agcaattaaagtaataaaat

SEQ ID NO: 4786 - RNA, 20 nt, synthetic construct
  source 1..20: mol_type = other RNA
taaagtaataaaattggaac

SEQ ID NO: 4787 - RNA, 20 nt, synthetic construct
  source 1..20: mol_type = other RNA
ttaaagtaataaaattggaa

SEQ ID NO: 4788 - RNA, 20 nt, synthetic construct
  source 1..20: mol_type = other RNA
attaaagtaataaaattgga

SEQ ID NO: 4789 - RNA, 20 nt, synthetic construct
  source 1..20: mol_type = other RNA
aattaaagtaataaaattgg

SEQ ID NO: 4790 - RNA, 20 nt, synthetic construct
  source 1..20: mol_type = other RNA
caattaaagtaataaaattg

SEQ ID NO: 4791 - RNA, 20 nt, synthetic construct
  source 1..20: mol_type = other RNA
acagttgactttggtgtgag

SEQ ID NO: 4792 - RNA, 20 nt, synthetic construct
  source 1..20: mol_type = other RNA
cagttgactttggtgtgagt

SEQ ID NO: 4793 - RNA, 20 nt, synthetic construct
  source 1..20: mol_type = other RNA
agttgactttggtgtgagtg

SEQ ID NO: 4794 - RNA, 20 nt, synthetic construct
  source 1..20: mol_type = other RNA
gttgactttggtgtgagtgc

SEQ ID NO: 4795 - RNA, 20 nt, synthetic construct
  source 1..20: mol_type = other RNA
ttgactttggtgtgagtgct

SEQ ID NO: 4796 - RNA, 20 nt, synthetic construct
  source 1..20: mol_type = other RNA
cgggatatcaagggccagaa

SEQ ID NO: 4797 - RNA, 20 nt, synthetic construct
  source 1..20: mol_type = other RNA
caccgggatatcaagggcca

SEQ ID NO: 4798 - RNA, 20 nt, synthetic construct
  source 1..20: mol_type = other RNA
accgggatatcaagggccag

SEQ ID NO: 4799 - RNA, 20 nt, synthetic construct
  source 1..20: mol_type = other RNA
ccgggatatcaagggccaga

SEQ ID NO: 4800 - RNA, 20 nt, synthetic construct
  source 1..20: mol_type = other RNA
gggatatcaagggccagaat

SEQ ID NO: 4801 - RNA, 20 nt, synthetic construct
  source 1..20: mol_type = other RNA
ggccagaatgtgttgctgac

SEQ ID NO: 4802 - RNA, 20 nt, synthetic construct
  source 1..20: mol_type = other RNA
ccagaatgtgttgctgactg

SEQ ID NO: 4803 - RNA, 20 nt, synthetic construct
  source 1..20: mol_type = other RNA
gggccagaatgtgttgctga

SEQ ID NO: 4804 - RNA, 20 nt, synthetic construct
  source 1..20: mol_type = other RNA
gccagaatgtgttgctgact

SEQ ID NO: 4805 - RNA, 20 nt, synthetic construct
  source 1..20: mol_type = other RNA
cagaatgtgttgctgactga

SEQ ID NO: 4806 - RNA, 20 nt, synthetic construct
  source 1..20: mol_type = other RNA
agaatgtgttgctgactgag

SEQ ID NO: 4807 - RNA, 20 nt, synthetic construct
  source 1..20: mol_type = other RNA
atcaaagttatggatgtcac

SEQ ID NO: 4808 - RNA, 20 nt, synthetic construct
  source 1..20: mol_type = other RNA
caaagttatggatgtcactg

SEQ ID NO: 4809 - RNA, 20 nt, synthetic construct
  source 1..20: mol_type = other RNA
agccatcaaagttatggatg

SEQ ID NO: 4810 - RNA, 20 nt, synthetic construct
  source 1..20: mol_type = other RNA
gccatcaaagttatggatgt

SEQ ID NO: 4811 - RNA, 20 nt, synthetic construct
  source 1..20: mol_type = other RNA
ccatcaaagttatggatgtc

SEQ ID NO: 4812 - RNA, 20 nt, synthetic construct
  source 1..20: mol_type = other RNA
catcaaagttatggatgtca

SEQ ID NO: 4813 - RNA, 20 nt, synthetic construct
  source 1..20: mol_type = other RNA
tcaaagttatggatgtcact

SEQ ID NO: 4814 - RNA, 20 nt, synthetic construct
  source 1..20: mol_type = other RNA
ctagctgactttggtgtggc

SEQ ID NO: 4815 - RNA, 20 nt, synthetic construct
  source 1..20: mol_type = other RNA
ctgactttggtgtggctgca

SEQ ID NO: 4816 - RNA, 20 nt, synthetic construct
  source 1..20: mol_type = other RNA
gctgactttggtgtggctgc

SEQ ID NO: 4817 - RNA, 20 nt, synthetic construct
  source 1..20: mol_type = other RNA
agctgactttggtgtggctg

SEQ ID NO: 4818 - RNA, 20 nt, synthetic construct
  source 1..20: mol_type = other RNA
tagctgactttggtgtggct

SEQ ID NO: 4819 - RNA, 20 nt, synthetic construct
  source 1..20: mol_type = other RNA
gagatatcaaagtaagttca

SEQ ID NO: 4820 - RNA, 20 nt, synthetic construct
  source 1..20: mol_type = other RNA
agagatatcaaagtaagttc

SEQ ID NO: 4821 - RNA, 20 nt, synthetic construct
  source 1..20: mol_type = other RNA
tagagatatcaaagtaagtt

SEQ ID NO: 4822 - RNA, 20 nt, synthetic construct
  source 1..20: mol_type = other RNA
atagagatatcaaagtaagt

SEQ ID NO: 4823 - RNA, 20 nt, synthetic construct
  source 1..20: mol_type = other RNA
catagagatatcaaagtaag

SEQ ID NO: 4824 - RNA, 20 nt, synthetic construct
  source 1..20: mol_type = other RNA
gtgactttggcctggcccgt

SEQ ID NO: 4825 - RNA, 20 nt, synthetic construct
  source 1..20: mol_type = other RNA
ctgtgactttggcctggccc

SEQ ID NO: 4826 - RNA, 20 nt, synthetic construct
  source 1..20: mol_type = other RNA
tgtgactttggcctggcccg

SEQ ID NO: 4827 - RNA, 20 nt, synthetic construct
  source 1..20: mol_type = other RNA
tctgtgactttggcctggcc

SEQ ID NO: 4828 - RNA, 20 nt, synthetic construct
  source 1..20: mol_type = other RNA
atctgtgactttggcctggc

SEQ ID NO: 4829 - RNA, 20 nt, synthetic construct
  source 1..20: mol_type = other RNA
gtgacctcaagccttccaac

SEQ ID NO: 4830 - RNA, 20 nt, synthetic construct
  source 1..20: mol_type = other RNA
cgtgacctcaagccttccaa

SEQ ID NO: 4831 - RNA, 20 nt, synthetic construct
  source 1..20: mol_type = other RNA
ccgtgacctcaagccttcca

SEQ ID NO: 4832 - RNA, 20 nt, synthetic construct
  source 1..20: mol_type = other RNA
accgtgacctcaagccttcc

SEQ ID NO: 4833 - RNA, 20 nt, synthetic construct
  source 1..20: mol_type = other RNA
caccgtgacctcaagccttc

SEQ ID NO: 4834 - RNA, 20 nt, synthetic construct
  source 1..20: mol_type = other RNA
ccaacctgctgctcaacacc

SEQ ID NO: 4835 - RNA, 20 nt, synthetic construct
  source 1..20: mol_type = other RNA
tccaacctgctgctcaacac

SEQ ID NO: 4836 - RNA, 20 nt, synthetic construct
  source 1..20: mol_type = other RNA
ttccaacctgctgctcaaca

SEQ ID NO: 4837 - RNA, 20 nt, synthetic construct
  source 1..20: mol_type = other RNA
cttccaacctgctgctcaac

SEQ ID NO: 4838 - RNA, 20 nt, synthetic construct
  source 1..20: mol_type = other RNA
ccttccaacctgctgctcaa

SEQ ID NO: 4839 - RNA, 20 nt, synthetic construct
  source 1..20: mol_type = other RNA
gccttccaacctgctgctca

SEQ ID NO: 4840 - RNA, 20 nt, synthetic construct
  source 1..20: mol_type = other RNA
atcaagaaaatcagcccctt

SEQ ID NO: 4841 - RNA, 20 nt, synthetic construct
  source 1..20: mol_type = other RNA
tcaagaaaatcagccccttt

SEQ ID NO: 4842 - RNA, 20 nt, synthetic construct
  source 1..20: mol_type = other RNA
tatcaagaaaatcagcccct

SEQ ID NO: 4843 - RNA, 20 nt, synthetic construct
  source 1..20: mol_type = other RNA
ctatcaagaaaatcagcccc

SEQ ID NO: 4844 - RNA, 20 nt, synthetic construct
  source 1..20: mol_type = other RNA
gctatcaagaaaatcagccc

SEQ ID NO: 4845 - RNA, 20 nt, synthetic construct
  source 1..20: mol_type = other RNA
agctatcaagaaaatcagcc

SEQ ID NO: 4846 - RNA, 20 nt, synthetic construct
  source 1..20: mol_type = other RNA
cctggactttggactggcca

SEQ ID NO: 4847 - RNA, 20 nt, synthetic construct
  source 1..20: mol_type = other RNA
tcctggactttggactggcc

SEQ ID NO: 4848 - RNA, 20 nt, synthetic construct
  source 1..20: mol_type = other RNA
tggactttggactggccagg

SEQ ID NO: 4849 - RNA, 20 nt, synthetic construct
  source 1..20: mol_type = other RNA
ctggactttggactggccag

SEQ ID NO: 4850 - RNA, 20 nt, synthetic construct
  source 1..20: mol_type = other RNA
atcctggactttggactggc

SEQ ID NO: 4851 - RNA, 20 nt, synthetic construct
  source 1..20: mol_type = other RNA
aggatttaaaaccaagtaac

SEQ ID NO: 4852 - RNA, 20 nt, synthetic construct
  source 1..20: mol_type = other RNA
taggatttaaaaccaagtaa

SEQ ID NO: 4853 - RNA, 20 nt, synthetic construct
  source 1..20: mol_type = other RNA
ttaggatttaaaaccaagta

SEQ ID NO: 4854 - RNA, 20 nt, synthetic construct
  source 1..20: mol_type = other RNA
gttaggatttaaaaccaagt

SEQ ID NO: 4855 - RNA, 20 nt, synthetic construct
  source 1..20: mol_type = other RNA
tgttaggatttaaaaccaag

SEQ ID NO: 4856 - RNA, 20 nt, synthetic construct
  source 1..20: mol_type = other RNA
agtaacattgtagtcaagtc

SEQ ID NO: 4857 - RNA, 20 nt, synthetic construct
  source 1..20: mol_type = other RNA
accaagtaacattgtagtca

SEQ ID NO: 4858 - RNA, 20 nt, synthetic construct
  source 1..20: mol_type = other RNA
gtaacattgtagtcaagtct

SEQ ID NO: 4859 - RNA, 20 nt, synthetic construct
  source 1..20: mol_type = other RNA
aagtaacattgtagtcaagt

SEQ ID NO: 4860 - RNA, 20 nt, synthetic construct
  source 1..20: mol_type = other RNA
caagtaacattgtagtcaag

SEQ ID NO: 4861 - RNA, 20 nt, synthetic construct
  source 1..20: mol_type = other RNA
ccaagtaacattgtagtcaa

SEQ ID NO: 4862 - RNA, 20 nt, synthetic construct
  source 1..20: mol_type = other RNA
ttaagaagctcagcagaccc

SEQ ID NO: 4863 - RNA, 20 nt, synthetic construct
  source 1..20: mol_type = other RNA
attaagaagctcagcagacc

SEQ ID NO: 4864 - RNA, 20 nt, synthetic construct
  source 1..20: mol_type = other RNA
cattaagaagctcagcagac

SEQ ID NO: 4865 - RNA, 20 nt, synthetic construct
  source 1..20: mol_type = other RNA
ccattaagaagctcagcaga

SEQ ID NO: 4866 - RNA, 20 nt, synthetic construct
  source 1..20: mol_type = other RNA
gccattaagaagctcagcag

SEQ ID NO: 4867 - RNA, 20 nt, synthetic construct
  source 1..20: mol_type = other RNA
ggccattaagaagctcagca

SEQ ID NO: 4868 - RNA, 20 nt, synthetic construct
  source 1..20: mol_type = other RNA
caggacctgaagcccagcaa

SEQ ID NO: 4869 - RNA, 20 nt, synthetic construct
  source 1..20: mol_type = other RNA
aggacctgaagcccagcaac

SEQ ID NO: 4870 - RNA, 20 nt, synthetic construct
  source 1..20: mol_type = other RNA
gcaggacctgaagcccagca

SEQ ID NO: 4871 - RNA, 20 nt, synthetic construct
  source 1..20: mol_type = other RNA
tgcaggacctgaagcccagc

SEQ ID NO: 4872 - RNA, 20 nt, synthetic construct
  source 1..20: mol_type = other RNA
ctgcaggacctgaagcccag

SEQ ID NO: 4873 - RNA, 20 nt, synthetic construct
  source 1..20: mol_type = other RNA
agcaacgtggctgtgaacga

SEQ ID NO: 4874 - RNA, 20 nt, synthetic construct
  source 1..20: mol_type = other RNA
cagcaacgtggctgtgaacg

SEQ ID NO: 4875 - RNA, 20 nt, synthetic construct
  source 1..20: mol_type = other RNA
cccagcaacgtggctgtgaa

SEQ ID NO: 4876 - RNA, 20 nt, synthetic construct
  source 1..20: mol_type = other RNA
gcaacgtggctgtgaacgag

SEQ ID NO: 4877 - RNA, 20 nt, synthetic construct
  source 1..20: mol_type = other RNA
ccagcaacgtggctgtgaac

SEQ ID NO: 4878 - RNA, 20 nt, synthetic construct
  source 1..20: mol_type = other RNA
gcccagcaacgtggctgtga

SEQ ID NO: 4879 - RNA, 20 nt, synthetic construct
  source 1..20: mol_type = other RNA
tgaagaagctgtcgcgcccc

SEQ ID NO: 4880 - RNA, 20 nt, synthetic construct
  source 1..20: mol_type = other RNA
gtgaagaagctgtcgcgccc

SEQ ID NO: 4881 - RNA, 20 nt, synthetic construct
  source 1..20: mol_type = other RNA
ggtgaagaagctgtcgcgcc

SEQ ID NO: 4882 - RNA, 20 nt, synthetic construct
  source 1..20: mol_type = other RNA
cggtgaagaagctgtcgcgc

SEQ ID NO: 4883 - RNA, 20 nt, synthetic construct
  source 1..20: mol_type = other RNA
gcggtgaagaagctgtcgcg

SEQ ID NO: 4884 - RNA, 20 nt, synthetic construct
  source 1..20: mol_type = other RNA
ggcggtgaagaagctgtcgc

SEQ ID NO: 4885 - RNA, 20 nt, synthetic construct
  source 1..20: mol_type = other RNA
cctggacttcggcctggcca

SEQ ID NO: 4886 - RNA, 20 nt, synthetic construct
  source 1..20: mol_type = other RNA
tcctggacttcggcctggcc

SEQ ID NO: 4887 - RNA, 20 nt, synthetic construct
  source 1..20: mol_type = other RNA
tggacttcggcctggccagg

SEQ ID NO: 4888 - RNA, 20 nt, synthetic construct
  source 1..20: mol_type = other RNA
ctggacttcggcctggccag

SEQ ID NO: 4889 - RNA, 20 nt, synthetic construct
  source 1..20: mol_type = other RNA
atcctggacttcggcctggc

SEQ ID NO: 4890 - RNA, 20 nt, synthetic construct
  source 1..20: mol_type = other RNA
aggacctgaagcccggcaac

SEQ ID NO: 4891 - RNA, 20 nt, synthetic construct
  source 1..20: mol_type = other RNA
caggacctgaagcccggcaa

SEQ ID NO: 4892 - RNA, 20 nt, synthetic construct
  source 1..20: mol_type = other RNA
ccaggacctgaagcccggca

SEQ ID NO: 4893 - RNA, 20 nt, synthetic construct
  source 1..20: mol_type = other RNA
cccaggacctgaagcccggc

SEQ ID NO: 4894 - RNA, 20 nt, synthetic construct
  source 1..20: mol_type = other RNA
ccccaggacctgaagcccgg

SEQ ID NO: 4895 - RNA, 20 nt, synthetic construct
  source 1..20: mol_type = other RNA
ggcaacctggctgtgaacga

SEQ ID NO: 4896 - RNA, 20 nt, synthetic construct
  source 1..20: mol_type = other RNA
cccggcaacctggctgtgaa

SEQ ID NO: 4897 - RNA, 20 nt, synthetic construct
  source 1..20: mol_type = other RNA
gcaacctggctgtgaacgaa

SEQ ID NO: 4898 - RNA, 20 nt, synthetic construct
  source 1..20: mol_type = other RNA
cggcaacctggctgtgaacg

SEQ ID NO: 4899 - RNA, 20 nt, synthetic construct
  source 1..20: mol_type = other RNA
ccggcaacctggctgtgaac

SEQ ID NO: 4900 - RNA, 20 nt, synthetic construct
  source 1..20: mol_type = other RNA
gcccggcaacctggctgtga

SEQ ID NO: 4901 - RNA, 20 nt, synthetic construct
  source 1..20: mol_type = other RNA
ggccatcaagaagctgtatc

SEQ ID NO: 4902 - RNA, 20 nt, synthetic construct
  source 1..20: mol_type = other RNA
tcaagaagctgtatcggcct

SEQ ID NO: 4903 - RNA, 20 nt, synthetic construct
  source 1..20: mol_type = other RNA
atcaagaagctgtatcggcc

SEQ ID NO: 4904 - RNA, 20 nt, synthetic construct
  source 1..20: mol_type = other RNA
catcaagaagctgtatcggc

SEQ ID NO: 4905 - RNA, 20 nt, synthetic construct
  source 1..20: mol_type = other RNA
ccatcaagaagctgtatcgg

SEQ ID NO: 4906 - RNA, 20 nt, synthetic construct
  source 1..20: mol_type = other RNA
gccatcaagaagctgtatcg

SEQ ID NO: 4907 - RNA, 20 nt, synthetic construct
  source 1..20: mol_type = other RNA
ccccaggacctgaagccagg

SEQ ID NO: 4908 - RNA, 20 nt, synthetic construct
  source 1..20: mol_type = other RNA
cccaggacctgaagccaggc

SEQ ID NO: 4909 - RNA, 20 nt, synthetic construct
  source 1..20: mol_type = other RNA
ccaggacctgaagccaggca

SEQ ID NO: 4910 - RNA, 20 nt, synthetic construct
  source 1..20: mol_type = other RNA
caggacctgaagccaggcaa

SEQ ID NO: 4911 - RNA, 20 nt, synthetic construct
  source 1..20: mol_type = other RNA
aggacctgaagccaggcaac

SEQ ID NO: 4912 - RNA, 20 nt, synthetic construct
  source 1..20: mol_type = other RNA
ccaggcaacctggctgtgaa

SEQ ID NO: 4913 - RNA, 20 nt, synthetic construct
  source 1..20: mol_type = other RNA
aggcaacctggctgtgaatg

SEQ ID NO: 4914 - RNA, 20 nt, synthetic construct
  source 1..20: mol_type = other RNA
ggcaacctggctgtgaatga

SEQ ID NO: 4915 - RNA, 20 nt, synthetic construct
  source 1..20: mol_type = other RNA
gccaggcaacctggctgtga

SEQ ID NO: 4916 - RNA, 20 nt, synthetic construct
  source 1..20: mol_type = other RNA
caggcaacctggctgtgaat

SEQ ID NO: 4917 - RNA, 20 nt, synthetic construct
  source 1..20: mol_type = other RNA
gcaacctggctgtgaatgag

SEQ ID NO: 4918 - RNA, 20 nt, synthetic construct
  source 1..20: mol_type = other RNA
ggccatcaagaagctgagcc

SEQ ID NO: 4919 - RNA, 20 nt, synthetic construct
  source 1..20: mol_type = other RNA
gccatcaagaagctgagccg

SEQ ID NO: 4920 - RNA, 20 nt, synthetic construct
  source 1..20: mol_type = other RNA
ccatcaagaagctgagccga

SEQ ID NO: 4921 - RNA, 20 nt, synthetic construct
  source 1..20: mol_type = other RNA
catcaagaagctgagccgac

SEQ ID NO: 4922 - RNA, 20 nt, synthetic construct
  source 1..20: mol_type = other RNA
atcaagaagctgagccgacc

SEQ ID NO: 4923 - RNA, 20 nt, synthetic construct
  source 1..20: mol_type = other RNA
tcaagaagctgagccgaccc

SEQ ID NO: 4924 - RNA, 20 nt, synthetic construct
  source 1..20: mol_type = other RNA
tcctaggacctaaaacctag

SEQ ID NO: 4925 - RNA, 20 nt, synthetic construct
  source 1..20: mol_type = other RNA
cctaggacctaaaacctagt

SEQ ID NO: 4926 - RNA, 20 nt, synthetic construct
  source 1..20: mol_type = other RNA
ctaggacctaaaacctagta

SEQ ID NO: 4927 - RNA, 20 nt, synthetic construct
  source 1..20: mol_type = other RNA
taggacctaaaacctagtaa

SEQ ID NO: 4928 - RNA, 20 nt, synthetic construct
  source 1..20: mol_type = other RNA
aggacctaaaacctagtaat

SEQ ID NO: 4929 - RNA, 20 nt, synthetic construct
  source 1..20: mol_type = other RNA
cctagtaatctagctgtgaa

SEQ ID NO: 4930 - RNA, 20 nt, synthetic construct
  source 1..20: mol_type = other RNA
agtaatctagctgtgaatga

SEQ ID NO: 4931 - RNA, 20 nt, synthetic construct
  source 1..20: mol_type = other RNA
acctagtaatctagctgtga

SEQ ID NO: 4932 - RNA, 20 nt, synthetic construct
  source 1..20: mol_type = other RNA
ctagtaatctagctgtgaat

SEQ ID NO: 4933 - RNA, 20 nt, synthetic construct
  source 1..20: mol_type = other RNA
tagtaatctagctgtgaatg

SEQ ID NO: 4934 - RNA, 20 nt, synthetic construct
  source 1..20: mol_type = other RNA
gtaatctagctgtgaatgaa

SEQ ID NO: 4935 - RNA, 20 nt, synthetic construct
  source 1..20: mol_type = other RNA
ggcagtgaagaagctctcca

SEQ ID NO: 4936 - RNA, 20 nt, synthetic construct
  source 1..20: mol_type = other RNA
gcagtgaagaagctctccag

SEQ ID NO: 4937 - RNA, 20 nt, synthetic construct
  source 1..20: mol_type = other RNA
cagtgaagaagctctccaga

SEQ ID NO: 4938 - RNA, 20 nt, synthetic construct
  source 1..20: mol_type = other RNA
agtgaagaagctctccagac

SEQ ID NO: 4939 - RNA, 20 nt, synthetic construct
  source 1..20: mol_type = other RNA
gtgaagaagctctccagacc

SEQ ID NO: 4940 - RNA, 20 nt, synthetic construct
  source 1..20: mol_type = other RNA
tgaagaagctctccagacca

SEQ ID NO: 4941 - RNA, 20 nt, synthetic construct
  source 1..20: mol_type = other RNA
tgtgtgactttggcctggcc

SEQ ID NO: 4942 - RNA, 20 nt, synthetic construct
  source 1..20: mol_type = other RNA
ctgtgtgactttggcctggc

SEQ ID NO: 4943 - RNA, 20 nt, synthetic construct
  source 1..20: mol_type = other RNA
gtgtgactttggcctggccc

SEQ ID NO: 4944 - RNA, 20 nt, synthetic construct
  source 1..20: mol_type = other RNA
gtgactttggcctggcccgc

SEQ ID NO: 4945 - RNA, 20 nt, synthetic construct
  source 1..20: mol_type = other RNA
caccgggaccagaaggtgcg

SEQ ID NO: 4946 - RNA, 20 nt, synthetic construct
  source 1..20: mol_type = other RNA
accgggaccagaaggtgcgg

SEQ ID NO: 4947 - RNA, 20 nt, synthetic construct
  source 1..20: mol_type = other RNA
ccgggaccagaaggtgcggt

SEQ ID NO: 4948 - RNA, 20 nt, synthetic construct
  source 1..20: mol_type = other RNA
cgggaccagaaggtgcggtt

SEQ ID NO: 4949 - RNA, 20 nt, synthetic construct
  source 1..20: mol_type = other RNA
gggaccagaaggtgcggttc

SEQ ID NO: 4950 - RNA, 20 nt, synthetic construct
  source 1..20: mol_type = other RNA
ccgtccaatgtgctcctgga

SEQ ID NO: 4951 - RNA, 20 nt, synthetic construct
  source 1..20: mol_type = other RNA
gccgtccaatgtgctcctgg

SEQ ID NO: 4952 - RNA, 20 nt, synthetic construct
  source 1..20: mol_type = other RNA
cgtccaatgtgctcctggat

SEQ ID NO: 4953 - RNA, 20 nt, synthetic construct
  source 1..20: mol_type = other RNA
gtccaatgtgctcctggatg

SEQ ID NO: 4954 - RNA, 20 nt, synthetic construct
  source 1..20: mol_type = other RNA
tccaatgtgctcctggatgc

SEQ ID NO: 4955 - RNA, 20 nt, synthetic construct
  source 1..20: mol_type = other RNA
ccaatgtgctcctggatgcc

SEQ ID NO: 4956 - RNA, 20 nt, synthetic construct
  source 1..20: mol_type = other RNA
gccatcaagaaaatctttga

SEQ ID NO: 4957 - RNA, 20 nt, synthetic construct
  source 1..20: mol_type = other RNA
ggccatcaagaaaatctttg

SEQ ID NO: 4958 - RNA, 20 nt, synthetic construct
  source 1..20: mol_type = other RNA
ccatcaagaaaatctttgat

SEQ ID NO: 4959 - RNA, 20 nt, synthetic construct
  source 1..20: mol_type = other RNA
catcaagaaaatctttgatg

SEQ ID NO: 4960 - RNA, 20 nt, synthetic construct
  source 1..20: mol_type = other RNA
atcaagaaaatctttgatgc

SEQ ID NO: 4961 - RNA, 20 nt, synthetic construct
  source 1..20: mol_type = other RNA
tcaagaaaatctttgatgct

SEQ ID NO: 4962 - RNA, 20 nt, synthetic construct
  source 1..20: mol_type = other RNA
ttgtgatttcggcctggccc

SEQ ID NO: 4963 - RNA, 20 nt, synthetic construct
  source 1..20: mol_type = other RNA
tttgtgatttcggcctggcc

SEQ ID NO: 4964 - RNA, 20 nt, synthetic construct
  source 1..20: mol_type = other RNA
gtgatttcggcctggcccgg

SEQ ID NO: 4965 - RNA, 20 nt, synthetic construct
  source 1..20: mol_type = other RNA
tgtgatttcggcctggcccg

SEQ ID NO: 4966 - RNA, 20 nt, synthetic construct
  source 1..20: mol_type = other RNA
atttgtgatttcggcctggc

SEQ ID NO: 4967 - RNA, 20 nt, synthetic construct
  source 1..20: mol_type = other RNA
gagatctaaagccctccaac

SEQ ID NO: 4968 - RNA, 20 nt, synthetic construct
  source 1..20: mol_type = other RNA
cgagatctaaagccctccaa

SEQ ID NO: 4969 - RNA, 20 nt, synthetic construct
  source 1..20: mol_type = other RNA
ccgagatctaaagccctcca

SEQ ID NO: 4970 - RNA, 20 nt, synthetic construct
  source 1..20: mol_type = other RNA
accgagatctaaagccctcc

SEQ ID NO: 4971 - RNA, 20 nt, synthetic construct
  source 1..20: mol_type = other RNA
caccgagatctaaagccctc

SEQ ID NO: 4972 - RNA, 20 nt, synthetic construct
  source 1..20: mol_type = other RNA
ccaacctgctcatcaacacc

SEQ ID NO: 4973 - RNA, 20 nt, synthetic construct
  source 1..20: mol_type = other RNA
tccaacctgctcatcaacac

SEQ ID NO: 4974 - RNA, 20 nt, synthetic construct
  source 1..20: mol_type = other RNA
ctccaacctgctcatcaaca

SEQ ID NO: 4975 - RNA, 20 nt, synthetic construct
  source 1..20: mol_type = other RNA
cctccaacctgctcatcaac

SEQ ID NO: 4976 - RNA, 20 nt, synthetic construct
  source 1..20: mol_type = other RNA
ccctccaacctgctcatcaa

SEQ ID NO: 4977 - RNA, 20 nt, synthetic construct
  source 1..20: mol_type = other RNA
gccctccaacctgctcatca

SEQ ID NO: 4978 - RNA, 20 nt, synthetic construct
  source 1..20: mol_type = other RNA
atcaagaagatcagcccctt

SEQ ID NO: 4979 - RNA, 20 nt, synthetic construct
  source 1..20: mol_type = other RNA
tcaagaagatcagccccttc

SEQ ID NO: 4980 - RNA, 20 nt, synthetic construct
  source 1..20: mol_type = other RNA
catcaagaagatcagcccct

SEQ ID NO: 4981 - RNA, 20 nt, synthetic construct
  source 1..20: mol_type = other RNA
ccatcaagaagatcagcccc

SEQ ID NO: 4982 - RNA, 20 nt, synthetic construct
  source 1..20: mol_type = other RNA
gccatcaagaagatcagccc

SEQ ID NO: 4983 - RNA, 20 nt, synthetic construct
  source 1..20: mol_type = other RNA
ggccatcaagaagatcagcc

SEQ ID NO: 4984 - RNA, 20 nt, synthetic construct
  source 1..20: mol_type = other RNA
ttggggatttcgggttggca

SEQ ID NO: 4985 - RNA, 20 nt, synthetic construct
  source 1..20: mol_type = other RNA
tggggatttcgggttggcaa

SEQ ID NO: 4986 - RNA, 20 nt, synthetic construct
  source 1..20: mol_type = other RNA
attggggatttcgggttggc

SEQ ID NO: 4987 - RNA, 20 nt, synthetic construct
  source 1..20: mol_type = other RNA
ggggatttcgggttggcaag

SEQ ID NO: 4988 - RNA, 20 nt, synthetic construct
  source 1..20: mol_type = other RNA
gggatttcgggttggcaagg

SEQ ID NO: 4989 - RNA, 20 nt, synthetic construct
  source 1..20: mol_type = other RNA
cacagggacctgaagcccgc

SEQ ID NO: 4990 - RNA, 20 nt, synthetic construct
  source 1..20: mol_type = other RNA
acagggacctgaagcccgcc

SEQ ID NO: 4991 - RNA, 20 nt, synthetic construct
  source 1..20: mol_type = other RNA
cagggacctgaagcccgcca

SEQ ID NO: 4992 - RNA, 20 nt, synthetic construct
  source 1..20: mol_type = other RNA
agggacctgaagcccgccaa

SEQ ID NO: 4993 - RNA, 20 nt, synthetic construct
  source 1..20: mol_type = other RNA
gggacctgaagcccgccaac

SEQ ID NO: 4994 - RNA, 20 nt, synthetic construct
  source 1..20: mol_type = other RNA
gccaacatcttcatcagcac

SEQ ID NO: 4995 - RNA, 20 nt, synthetic construct
  source 1..20: mol_type = other RNA
gcccgccaacatcttcatca

SEQ ID NO: 4996 - RNA, 20 nt, synthetic construct
  source 1..20: mol_type = other RNA
cccgccaacatcttcatcag

SEQ ID NO: 4997 - RNA, 20 nt, synthetic construct
  source 1..20: mol_type = other RNA
ccgccaacatcttcatcagc

SEQ ID NO: 4998 - RNA, 20 nt, synthetic construct
  source 1..20: mol_type = other RNA
cgccaacatcttcatcagca

SEQ ID NO: 4999 - RNA, 20 nt, synthetic construct
  source 1..20: mol_type = other RNA
ccaacatcttcatcagcaca

SEQ ID NO: 5000 - RNA, 20 nt, synthetic construct
  source 1..20: mol_type = other RNA
cgctgtgaagaagattgccc

SEQ ID NO: 5001 - RNA, 20 nt, synthetic construct
  source 1..20: mol_type = other RNA
ctgtgaagaagattgccctg

SEQ ID NO: 5002 - RNA, 20 nt, synthetic construct
  source 1..20: mol_type = other RNA
gtgaagaagattgccctgag

SEQ ID NO: 5003 - RNA, 20 nt, synthetic construct
  source 1..20: mol_type = other RNA
gctgtgaagaagattgccct

SEQ ID NO: 5004 - RNA, 20 nt, synthetic construct
  source 1..20: mol_type = other RNA
tgtgaagaagattgccctga

SEQ ID NO: 5005 - RNA, 20 nt, synthetic construct
  source 1..20: mol_type = other RNA
tgaagaagattgccctgagc

SEQ ID NO: 5006 - RNA, 20 nt, synthetic construct
  source 1..20: mol_type = other RNA
taggtgactttggtcttgca

SEQ ID NO: 5007 - RNA, 20 nt, synthetic construct
  source 1..20: mol_type = other RNA
aggtgactttggtcttgcac

SEQ ID NO: 5008 - RNA, 20 nt, synthetic construct
  source 1..20: mol_type = other RNA
ataggtgactttggtcttgc

SEQ ID NO: 5009 - RNA, 20 nt, synthetic construct
  source 1..20: mol_type = other RNA
ggtgactttggtcttgcacg

SEQ ID NO: 5010 - RNA, 20 nt, synthetic construct
  source 1..20: mol_type = other RNA
gtgactttggtcttgcacgg

SEQ ID NO: 5011 - RNA, 20 nt, synthetic construct
  source 1..20: mol_type = other RNA
cacagagatctcaaaccagc

SEQ ID NO: 5012 - RNA, 20 nt, synthetic construct
  source 1..20: mol_type = other RNA
acagagatctcaaaccagct

SEQ ID NO: 5013 - RNA, 20 nt, synthetic construct
  source 1..20: mol_type = other RNA
cagagatctcaaaccagcta

SEQ ID NO: 5014 - RNA, 20 nt, synthetic construct
  source 1..20: mol_type = other RNA
agagatctcaaaccagctaa

SEQ ID NO: 5015 - RNA, 20 nt, synthetic construct
  source 1..20: mol_type = other RNA
gagatctcaaaccagctaat

SEQ ID NO: 5016 - RNA, 20 nt, synthetic construct
  source 1..20: mol_type = other RNA
atcaagaaaattgtccttac

SEQ ID NO: 5017 - RNA, 20 nt, synthetic construct
  source 1..20: mol_type = other RNA
agccatcaagaaaattgtcc

SEQ ID NO: 5018 - RNA, 20 nt, synthetic construct
  source 1..20: mol_type = other RNA
gccatcaagaaaattgtcct

SEQ ID NO: 5019 - RNA, 20 nt, synthetic construct
  source 1..20: mol_type = other RNA
ccatcaagaaaattgtcctt

SEQ ID NO: 5020 - RNA, 20 nt, synthetic construct
  source 1..20: mol_type = other RNA
catcaagaaaattgtcctta

SEQ ID NO: 5021 - RNA, 20 nt, synthetic construct
  source 1..20: mol_type = other RNA
tcaagaaaattgtccttact

SEQ ID NO: 5022 - RNA, 20 nt, synthetic construct
  source 1..20: mol_type = other RNA
ttggtgactttggtatggct

SEQ ID NO: 5023 - RNA, 20 nt, synthetic construct
  source 1..20: mol_type = other RNA
ggtgactttggtatggctcg

SEQ ID NO: 5024 - RNA, 20 nt, synthetic construct
  source 1..20: mol_type = other RNA
gtgactttggtatggctcgt

SEQ ID NO: 5025 - RNA, 20 nt, synthetic construct
  source 1..20: mol_type = other RNA
attggtgactttggtatggc

SEQ ID NO: 5026 - RNA, 20 nt, synthetic construct
  source 1..20: mol_type = other RNA
tggtgactttggtatggctc

SEQ ID NO: 5027 - RNA, 20 nt, synthetic construct
  source 1..20: mol_type = other RNA
caccgtgacctgaagccctc

SEQ ID NO: 5028 - RNA, 20 nt, synthetic construct
  source 1..20: mol_type = other RNA
accgtgacctgaagccctcc

SEQ ID NO: 5029 - RNA, 20 nt, synthetic construct
  source 1..20: mol_type = other RNA
ccgtgacctgaagccctcca

SEQ ID NO: 5030 - RNA, 20 nt, synthetic construct
  source 1..20: mol_type = other RNA
cgtgacctgaagccctccaa

SEQ ID NO: 5031 - RNA, 20 nt, synthetic construct
  source 1..20: mol_type = other RNA
gtgacctgaagccctccaac

SEQ ID NO: 5032 - RNA, 20 nt, synthetic construct
  source 1..20: mol_type = other RNA
ccctccaacctattggtgaa

SEQ ID NO: 5033 - RNA, 20 nt, synthetic construct
  source 1..20: mol_type = other RNA
ctccaacctattggtgaatg

SEQ ID NO: 5034 - RNA, 20 nt, synthetic construct
  source 1..20: mol_type = other RNA
gccctccaacctattggtga

SEQ ID NO: 5035 - RNA, 20 nt, synthetic construct
  source 1..20: mol_type = other RNA
cctccaacctattggtgaat

SEQ ID NO: 5036 - RNA, 20 nt, synthetic construct
  source 1..20: mol_type = other RNA
tccaacctattggtgaatga

SEQ ID NO: 5037 - RNA, 20 nt, synthetic construct
  source 1..20: mol_type = other RNA
ccaacctattggtgaatgag

SEQ ID NO: 5038 - RNA, 20 nt, synthetic construct
  source 1..20: mol_type = other RNA
gccatcaagaagatccctaa

SEQ ID NO: 5039 - RNA, 20 nt, synthetic construct
  source 1..20: mol_type = other RNA
ggccatcaagaagatcccta

SEQ ID NO: 5040 - RNA, 20 nt, synthetic construct
  source 1..20: mol_type = other RNA
ccatcaagaagatccctaat

SEQ ID NO: 5041 - RNA, 20 nt, synthetic construct
  source 1..20: mol_type = other RNA
catcaagaagatccctaatg

SEQ ID NO: 5042 - RNA, 20 nt, synthetic construct
  source 1..20: mol_type = other RNA
atcaagaagatccctaatgc

SEQ ID NO: 5043 - RNA, 20 nt, synthetic construct
  source 1..20: mol_type = other RNA
tcaagaagatccctaatgct

SEQ ID NO: 5044 - RNA, 20 nt, synthetic construct
  source 1..20: mol_type = other RNA
ttcttgacttcggtctggcc

SEQ ID NO: 5045 - RNA, 20 nt, synthetic construct
  source 1..20: mol_type = other RNA
tcttgacttcggtctggcca

SEQ ID NO: 5046 - RNA, 20 nt, synthetic construct
  source 1..20: mol_type = other RNA
attcttgacttcggtctggc

SEQ ID NO: 5047 - RNA, 20 nt, synthetic construct
  source 1..20: mol_type = other RNA
cttgacttcggtctggccag

SEQ ID NO: 5048 - RNA, 20 nt, synthetic construct
  source 1..20: mol_type = other RNA
ttgacttcggtctggccagg

SEQ ID NO: 5049 - RNA, 20 nt, synthetic construct
  source 1..20: mol_type = other RNA
ctgaaggacttaaagcccag

SEQ ID NO: 5050 - RNA, 20 nt, synthetic construct
  source 1..20: mol_type = other RNA
tgaaggacttaaagcccagt

SEQ ID NO: 5051 - RNA, 20 nt, synthetic construct
  source 1..20: mol_type = other RNA
gaaggacttaaagcccagta

SEQ ID NO: 5052 - RNA, 20 nt, synthetic construct
  source 1..20: mol_type = other RNA
aaggacttaaagcccagtaa

SEQ ID NO: 5053 - RNA, 20 nt, synthetic construct
  source 1..20: mol_type = other RNA
aggacttaaagcccagtaat

SEQ ID NO: 5054 - RNA, 20 nt, synthetic construct
  source 1..20: mol_type = other RNA
agtaatatagtagtaaaatc

SEQ ID NO: 5055 - RNA, 20 nt, synthetic construct
  source 1..20: mol_type = other RNA
gcccagtaatatagtagtaa

SEQ ID NO: 5056 - RNA, 20 nt, synthetic construct
  source 1..20: mol_type = other RNA
cccagtaatatagtagtaaa

SEQ ID NO: 5057 - RNA, 20 nt, synthetic construct
  source 1..20: mol_type = other RNA
ccagtaatatagtagtaaaa

SEQ ID NO: 5058 - RNA, 20 nt, synthetic construct
  source 1..20: mol_type = other RNA
cagtaatatagtagtaaaat

SEQ ID NO: 5059 - RNA, 20 nt, synthetic construct
  source 1..20: mol_type = other RNA
gtaatatagtagtaaaatct

SEQ ID NO: 5060 - RNA, 20 nt, synthetic construct
  source 1..20: mol_type = other RNA
tgcaatcaagaagctaagcc

SEQ ID NO: 5061 - RNA, 20 nt, synthetic construct
  source 1..20: mol_type = other RNA
gcaatcaagaagctaagccg

SEQ ID NO: 5062 - RNA, 20 nt, synthetic construct
  source 1..20: mol_type = other RNA
caatcaagaagctaagccga

SEQ ID NO: 5063 - RNA, 20 nt, synthetic construct
  source 1..20: mol_type = other RNA
aatcaagaagctaagccgac

SEQ ID NO: 5064 - RNA, 20 nt, synthetic construct
  source 1..20: mol_type = other RNA
atcaagaagctaagccgacc

SEQ ID NO: 5065 - RNA, 20 nt, synthetic construct
  source 1..20: mol_type = other RNA
tcaagaagctaagccgacca

SEQ ID NO: 5066 - RNA, 20 nt, synthetic construct
  source 1..20: mol_type = other RNA
ccttgactttggcctggccc

SEQ ID NO: 5067 - RNA, 20 nt, synthetic construct
  source 1..20: mol_type = other RNA
tccttgactttggcctggcc

SEQ ID NO: 5068 - RNA, 20 nt, synthetic construct
  source 1..20: mol_type = other RNA
ttgactttggcctggcccgg

SEQ ID NO: 5069 - RNA, 20 nt, synthetic construct
  source 1..20: mol_type = other RNA
cttgactttggcctggcccg

SEQ ID NO: 5070 - RNA, 20 nt, synthetic construct
  source 1..20: mol_type = other RNA
atccttgactttggcctggc

SEQ ID NO: 5071 - RNA, 20 nt, synthetic construct
  source 1..20: mol_type = other RNA
aggatttgaagcctagcaac

SEQ ID NO: 5072 - RNA, 20 nt, synthetic construct
  source 1..20: mol_type = other RNA
taggatttgaagcctagcaa

SEQ ID NO: 5073 - RNA, 20 nt, synthetic construct
  source 1..20: mol_type = other RNA
ctaggatttgaagcctagca

SEQ ID NO: 5074 - RNA, 20 nt, synthetic construct
  source 1..20: mol_type = other RNA
cctaggatttgaagcctagc

SEQ ID NO: 5075 - RNA, 20 nt, synthetic construct
  source 1..20: mol_type = other RNA
tcctaggatttgaagcctag

SEQ ID NO: 5076 - RNA, 20 nt, synthetic construct
  source 1..20: mol_type = other RNA
agcaacattgttgtgaaatc

SEQ ID NO: 5077 - RNA, 20 nt, synthetic construct
  source 1..20: mol_type = other RNA
gcaacattgttgtgaaatca

SEQ ID NO: 5078 - RNA, 20 nt, synthetic construct
  source 1..20: mol_type = other RNA
tagcaacattgttgtgaaat

SEQ ID NO: 5079 - RNA, 20 nt, synthetic construct
  source 1..20: mol_type = other RNA
ctagcaacattgttgtgaaa

SEQ ID NO: 5080 - RNA, 20 nt, synthetic construct
  source 1..20: mol_type = other RNA
cctagcaacattgttgtgaa

SEQ ID NO: 5081 - RNA, 20 nt, synthetic construct
  source 1..20: mol_type = other RNA
gcctagcaacattgttgtga

SEQ ID NO: 5082 - RNA, 20 nt, synthetic construct
  source 1..20: mol_type = other RNA
tcaagaaactaagccgtcct

SEQ ID NO: 5083 - RNA, 20 nt, synthetic construct
  source 1..20: mol_type = other RNA
gtcaagaaactaagccgtcc

SEQ ID NO: 5084 - RNA, 20 nt, synthetic construct
  source 1..20: mol_type = other RNA
agtcaagaaactaagccgtc

SEQ ID NO: 5085 - RNA, 20 nt, synthetic construct
  source 1..20: mol_type = other RNA
cagtcaagaaactaagccgt

SEQ ID NO: 5086 - RNA, 20 nt, synthetic construct
  source 1..20: mol_type = other RNA
gcagtcaagaaactaagccg

SEQ ID NO: 5087 - RNA, 20 nt, synthetic construct
  source 1..20: mol_type = other RNA
tgcagtcaagaaactaagcc

SEQ ID NO: 5088 - RNA, 20 nt, synthetic construct
  source 1..20: mol_type = other RNA
cactgactttggctttgcca

SEQ ID NO: 5089 - RNA, 20 nt, synthetic construct
  source 1..20: mol_type = other RNA
ctcactgactttggctttgc

SEQ ID NO: 5090 - RNA, 20 nt, synthetic construct
  source 1..20: mol_type = other RNA
tcactgactttggctttgcc

SEQ ID NO: 5091 - RNA, 20 nt, synthetic construct
  source 1..20: mol_type = other RNA
actgactttggctttgccaa

SEQ ID NO: 5092 - RNA, 20 nt, synthetic construct
  source 1..20: mol_type = other RNA
ctgactttggctttgccaag

SEQ ID NO: 5093 - RNA, 20 nt, synthetic construct
  source 1..20: mol_type = other RNA
catcgggatgtcaaggtgcc

SEQ ID NO: 5094 - RNA, 20 nt, synthetic construct
  source 1..20: mol_type = other RNA
cgggatgtcaaggtgccagc

SEQ ID NO: 5095 - RNA, 20 nt, synthetic construct
  source 1..20: mol_type = other RNA
atcgggatgtcaaggtgcca

SEQ ID NO: 5096 - RNA, 20 nt, synthetic construct
  source 1..20: mol_type = other RNA
tcgggatgtcaaggtgccag

SEQ ID NO: 5097 - RNA, 20 nt, synthetic construct
  source 1..20: mol_type = other RNA
gggatgtcaaggtgccagct

SEQ ID NO: 5098 - RNA, 20 nt, synthetic construct
  source 1..20: mol_type = other RNA
gcctgagaatctcttataca

SEQ ID NO: 5099 - RNA, 20 nt, synthetic construct
  source 1..20: mol_type = other RNA
cctgagaatctcttatacac

SEQ ID NO: 5100 - RNA, 20 nt, synthetic construct
  source 1..20: mol_type = other RNA
ctgagaatctcttatacacc

SEQ ID NO: 5101 - RNA, 20 nt, synthetic construct
  source 1..20: mol_type = other RNA
tgagaatctcttatacacct

SEQ ID NO: 5102 - RNA, 20 nt, synthetic construct
  source 1..20: mol_type = other RNA
gagaatctcttatacacctc

SEQ ID NO: 5103 - RNA, 20 nt, synthetic construct
  source 1..20: mol_type = other RNA
agaatctcttatacacctcc

SEQ ID NO: 5104 - RNA, 20 nt, synthetic construct
  source 1..20: mol_type = other RNA
cgccctcaaagtaggtctgg

SEQ ID NO: 5105 - RNA, 20 nt, synthetic construct
  source 1..20: mol_type = other RNA
ctcaaagtaggtctggggcc

SEQ ID NO: 5106 - RNA, 20 nt, synthetic construct
  source 1..20: mol_type = other RNA
tcaaagtaggtctggggccc

SEQ ID NO: 5107 - RNA, 20 nt, synthetic construct
  source 1..20: mol_type = other RNA
caaagtaggtctggggcccg

SEQ ID NO: 5108 - RNA, 20 nt, synthetic construct
  source 1..20: mol_type = other RNA
gccctcaaagtaggtctggg

SEQ ID NO: 5109 - RNA, 20 nt, synthetic construct
  source 1..20: mol_type = other RNA
ccctcaaagtaggtctgggg

SEQ ID NO: 5110 - RNA, 20 nt, synthetic construct
  source 1..20: mol_type = other RNA
cctcaaagtaggtctggggc

SEQ ID NO: 5111 - RNA, 20 nt, synthetic construct
  source 1..20: mol_type = other RNA
caccgagatgtcaaggtgag

SEQ ID NO: 5112 - RNA, 20 nt, synthetic construct
  source 1..20: mol_type = other RNA
accgagatgtcaaggtgagg

SEQ ID NO: 5113 - RNA, 20 nt, synthetic construct
  source 1..20: mol_type = other RNA
ccgagatgtcaaggtgaggc

SEQ ID NO: 5114 - RNA, 20 nt, synthetic construct
  source 1..20: mol_type = other RNA
cgagatgtcaaggtgaggct

SEQ ID NO: 5115 - RNA, 20 nt, synthetic construct
  source 1..20: mol_type = other RNA
gagatgtcaaggtgaggctc

SEQ ID NO: 5116 - RNA, 20 nt, synthetic construct
  source 1..20: mol_type = other RNA
gcctgaaaacctactctaca

SEQ ID NO: 5117 - RNA, 20 nt, synthetic construct
  source 1..20: mol_type = other RNA
cctgaaaacctactctacac

SEQ ID NO: 5118 - RNA, 20 nt, synthetic construct
  source 1..20: mol_type = other RNA
ctgaaaacctactctacaca

SEQ ID NO: 5119 - RNA, 20 nt, synthetic construct
  source 1..20: mol_type = other RNA
tgaaaacctactctacacat

SEQ ID NO: 5120 - RNA, 20 nt, synthetic construct
  source 1..20: mol_type = other RNA
gaaaacctactctacacatc

SEQ ID NO: 5121 - RNA, 20 nt, synthetic construct
  source 1..20: mol_type = other RNA
aaaacctactctacacatct

SEQ ID NO: 5122 - RNA, 20 nt, synthetic construct
  source 1..20: mol_type = other RNA
tgccctgaaggtcagtgagc

SEQ ID NO: 5123 - RNA, 20 nt, synthetic construct
  source 1..20: mol_type = other RNA
gccctgaaggtcagtgagcc

SEQ ID NO: 5124 - RNA, 20 nt, synthetic construct
  source 1..20: mol_type = other RNA
ccctgaaggtcagtgagccc

SEQ ID NO: 5125 - RNA, 20 nt, synthetic construct
  source 1..20: mol_type = other RNA
cctgaaggtcagtgagccct

SEQ ID NO: 5126 - RNA, 20 nt, synthetic construct
  source 1..20: mol_type = other RNA
ctgaaggtcagtgagccctc

SEQ ID NO: 5127 - RNA, 20 nt, synthetic construct
  source 1..20: mol_type = other RNA
tgaaggtcagtgagccctca

SEQ ID NO: 5128 - RNA, 20 nt, synthetic construct
  source 1..20: mol_type = other RNA
gtgtgactttggatttgcca

SEQ ID NO: 5129 - RNA, 20 nt, synthetic construct
  source 1..20: mol_type = other RNA
ttgtgtgactttggatttgc

SEQ ID NO: 5130 - RNA, 20 nt, synthetic construct
  source 1..20: mol_type = other RNA
tgtgtgactttggatttgcc

SEQ ID NO: 5131 - RNA, 20 nt, synthetic construct
  source 1..20: mol_type = other RNA
tgtgactttggatttgccaa

SEQ ID NO: 5132 - RNA, 20 nt, synthetic construct
  source 1..20: mol_type = other RNA
gtgactttggatttgccaag

SEQ ID NO: 5133 - RNA, 20 nt, synthetic construct
  source 1..20: mol_type = other RNA
cacagagacctcaagcctga

SEQ ID NO: 5134 - RNA, 20 nt, synthetic construct
  source 1..20: mol_type = other RNA
acagagacctcaagcctgaa

SEQ ID NO: 5135 - RNA, 20 nt, synthetic construct
  source 1..20: mol_type = other RNA
cagagacctcaagcctgaaa

SEQ ID NO: 5136 - RNA, 20 nt, synthetic construct
  source 1..20: mol_type = other RNA
agagacctcaagcctgaaaa

SEQ ID NO: 5137 - RNA, 20 nt, synthetic construct
  source 1..20: mol_type = other RNA
gagacctcaagcctgaaaat

SEQ ID NO: 5138 - RNA, 20 nt, synthetic construct
  source 1..20: mol_type = other RNA
cgctgaaaattcttcttgat

SEQ ID NO: 5139 - RNA, 20 nt, synthetic construct
  source 1..20: mol_type = other RNA
tgcgctgaaaattcttcttg

SEQ ID NO: 5140 - RNA, 20 nt, synthetic construct
  source 1..20: mol_type = other RNA
gcgctgaaaattcttcttga

SEQ ID NO: 5141 - RNA, 20 nt, synthetic construct
  source 1..20: mol_type = other RNA
gctgaaaattcttcttgatc

SEQ ID NO: 5142 - RNA, 20 nt, synthetic construct
  source 1..20: mol_type = other RNA
ctgaaaattcttcttgatcg

SEQ ID NO: 5143 - RNA, 20 nt, synthetic construct
  source 1..20: mol_type = other RNA
tgaaaattcttcttgatcgt

SEQ ID NO: 5144 - RNA, 20 nt, synthetic construct
  source 1..20: mol_type = other RNA
gaaaattcttcttgatcgtc

SEQ ID NO: 5145 - RNA, 20 nt, synthetic construct
  source 1..20: mol_type = other RNA
gtgatcttaaggtaagcttc

SEQ ID NO: 5146 - RNA, 20 nt, synthetic construct
  source 1..20: mol_type = other RNA
caccgtgatcttaaggtaag

SEQ ID NO: 5147 - RNA, 20 nt, synthetic construct
  source 1..20: mol_type = other RNA
accgtgatcttaaggtaagc

SEQ ID NO: 5148 - RNA, 20 nt, synthetic construct
  source 1..20: mol_type = other RNA
ccgtgatcttaaggtaagct

SEQ ID NO: 5149 - RNA, 20 nt, synthetic construct
  source 1..20: mol_type = other RNA
cgtgatcttaaggtaagctt

SEQ ID NO: 5150 - RNA, 20 nt, synthetic construct
  source 1..20: mol_type = other RNA
gctgaaaaccttctccttga

SEQ ID NO: 5151 - RNA, 20 nt, synthetic construct
  source 1..20: mol_type = other RNA
ctgaaaaccttctccttgat

SEQ ID NO: 5152 - RNA, 20 nt, synthetic construct
  source 1..20: mol_type = other RNA
gaaaaccttctccttgatgg

SEQ ID NO: 5153 - RNA, 20 nt, synthetic construct
  source 1..20: mol_type = other RNA
ggctgaaaaccttctccttg

SEQ ID NO: 5154 - RNA, 20 nt, synthetic construct
  source 1..20: mol_type = other RNA
tgaaaaccttctccttgatg

SEQ ID NO: 5155 - RNA, 20 nt, synthetic construct
  source 1..20: mol_type = other RNA
aaaaccttctccttgatggt

SEQ ID NO: 5156 - RNA, 20 nt, synthetic construct
  source 1..20: mol_type = other RNA
gaaaataatagacaaaactc

SEQ ID NO: 5157 - RNA, 20 nt, synthetic construct
  source 1..20: mol_type = other RNA
tgctgtgaaaataatagaca

SEQ ID NO: 5158 - RNA, 20 nt, synthetic construct
  source 1..20: mol_type = other RNA
gctgtgaaaataatagacaa

SEQ ID NO: 5159 - RNA, 20 nt, synthetic construct
  source 1..20: mol_type = other RNA
ctgtgaaaataatagacaaa

SEQ ID NO: 5160 - RNA, 20 nt, synthetic construct
  source 1..20: mol_type = other RNA
tgtgaaaataatagacaaaa

SEQ ID NO: 5161 - RNA, 20 nt, synthetic construct
  source 1..20: mol_type = other RNA
gtgaaaataatagacaaaac

SEQ ID NO: 5162 - RNA, 20 nt, synthetic construct
  source 1..20: mol_type = other RNA
tgaaaataatagacaaaact

SEQ ID NO: 5163 - RNA, 20 nt, synthetic construct
  source 1..20: mol_type = other RNA
gcagactttggcttcagcaa

SEQ ID NO: 5164 - RNA, 20 nt, synthetic construct
  source 1..20: mol_type = other RNA
attgcagactttggcttcag

SEQ ID NO: 5165 - RNA, 20 nt, synthetic construct
  source 1..20: mol_type = other RNA
ttgcagactttggcttcagc

SEQ ID NO: 5166 - RNA, 20 nt, synthetic construct
  source 1..20: mol_type = other RNA
tgcagactttggcttcagca

SEQ ID NO: 5167 - RNA, 20 nt, synthetic construct
  source 1..20: mol_type = other RNA
cagactttggcttcagcaat

SEQ ID NO: 5168 - RNA, 20 nt, synthetic construct
  source 1..20: mol_type = other RNA
agagacttaaaggtaaggca

SEQ ID NO: 5169 - RNA, 20 nt, synthetic construct
  source 1..20: mol_type = other RNA
catagagacttaaaggtaag

SEQ ID NO: 5170 - RNA, 20 nt, synthetic construct
  source 1..20: mol_type = other RNA
atagagacttaaaggtaagg

SEQ ID NO: 5171 - RNA, 20 nt, synthetic construct
  source 1..20: mol_type = other RNA
tagagacttaaaggtaaggc

SEQ ID NO: 5172 - RNA, 20 nt, synthetic construct
  source 1..20: mol_type = other RNA
gagacttaaaggtaaggcat

SEQ ID NO: 5173 - RNA, 20 nt, synthetic construct
  source 1..20: mol_type = other RNA
gcagaaaacctgctcttgga

SEQ ID NO: 5174 - RNA, 20 nt, synthetic construct
  source 1..20: mol_type = other RNA
gaaaacctgctcttggatgc

SEQ ID NO: 5175 - RNA, 20 nt, synthetic construct
  source 1..20: mol_type = other RNA
ggcagaaaacctgctcttgg

SEQ ID NO: 5176 - RNA, 20 nt, synthetic construct
  source 1..20: mol_type = other RNA
cagaaaacctgctcttggat

SEQ ID NO: 5177 - RNA, 20 nt, synthetic construct
  source 1..20: mol_type = other RNA
agaaaacctgctcttggatg

SEQ ID NO: 5178 - RNA, 20 nt, synthetic construct
  source 1..20: mol_type = other RNA
aaaacctgctcttggatgct

SEQ ID NO: 5179 - RNA, 20 nt, synthetic construct
  source 1..20: mol_type = other RNA
agctgtgaagatcattgaca

SEQ ID NO: 5180 - RNA, 20 nt, synthetic construct
  source 1..20: mol_type = other RNA
gctgtgaagatcattgacaa

SEQ ID NO: 5181 - RNA, 20 nt, synthetic construct
  source 1..20: mol_type = other RNA
ctgtgaagatcattgacaag

SEQ ID NO: 5182 - RNA, 20 nt, synthetic construct
  source 1..20: mol_type = other RNA
tgtgaagatcattgacaaga

SEQ ID NO: 5183 - RNA, 20 nt, synthetic construct
  source 1..20: mol_type = other RNA
gtgaagatcattgacaagac

SEQ ID NO: 5184 - RNA, 20 nt, synthetic construct
  source 1..20: mol_type = other RNA
tgaagatcattgacaagact

SEQ ID NO: 5185 - RNA, 20 nt, synthetic construct
  source 1..20: mol_type = other RNA
atcgagacctcaaggtgagt

SEQ ID NO: 5186 - RNA, 20 nt, synthetic construct
  source 1..20: mol_type = other RNA
gagacctcaaggtgagtaga

SEQ ID NO: 5187 - RNA, 20 nt, synthetic construct
  source 1..20: mol_type = other RNA
catcgagacctcaaggtgag

SEQ ID NO: 5188 - RNA, 20 nt, synthetic construct
  source 1..20: mol_type = other RNA
tcgagacctcaaggtgagta

SEQ ID NO: 5189 - RNA, 20 nt, synthetic construct
  source 1..20: mol_type = other RNA
cgagacctcaaggtgagtag

SEQ ID NO: 5190 - RNA, 20 nt, synthetic construct
  source 1..20: mol_type = other RNA
gctgaaaatctattgttaga

SEQ ID NO: 5191 - RNA, 20 nt, synthetic construct
  source 1..20: mol_type = other RNA
gaaaatctattgttagatgc

SEQ ID NO: 5192 - RNA, 20 nt, synthetic construct
  source 1..20: mol_type = other RNA
ggctgaaaatctattgttag

SEQ ID NO: 5193 - RNA, 20 nt, synthetic construct
  source 1..20: mol_type = other RNA
ctgaaaatctattgttagat

SEQ ID NO: 5194 - RNA, 20 nt, synthetic construct
  source 1..20: mol_type = other RNA
tgaaaatctattgttagatg

SEQ ID NO: 5195 - RNA, 20 nt, synthetic construct
  source 1..20: mol_type = other RNA
aaaatctattgttagatgcc

SEQ ID NO: 5196 - RNA, 20 nt, synthetic construct
  source 1..20: mol_type = other RNA
gctgactttggcttcagcaa

SEQ ID NO: 5197 - RNA, 20 nt, synthetic construct
  source 1..20: mol_type = other RNA
attgctgactttggcttcag

SEQ ID NO: 5198 - RNA, 20 nt, synthetic construct
  source 1..20: mol_type = other RNA
ttgctgactttggcttcagc

SEQ ID NO: 5199 - RNA, 20 nt, synthetic construct
  source 1..20: mol_type = other RNA
tgctgactttggcttcagca

SEQ ID NO: 5200 - RNA, 20 nt, synthetic construct
  source 1..20: mol_type = other RNA
ctgactttggcttcagcaac

SEQ ID NO: 5201 - RNA, 20 nt, synthetic construct
  source 1..20: mol_type = other RNA
gggacctgaaggtaagcccc

SEQ ID NO: 5202 - RNA, 20 nt, synthetic construct
  source 1..20: mol_type = other RNA
cacagggacctgaaggtaag

SEQ ID NO: 5203 - RNA, 20 nt, synthetic construct
  source 1..20: mol_type = other RNA
acagggacctgaaggtaagc

SEQ ID NO: 5204 - RNA, 20 nt, synthetic construct
  source 1..20: mol_type = other RNA
cagggacctgaaggtaagcc

SEQ ID NO: 5205 - RNA, 20 nt, synthetic construct
  source 1..20: mol_type = other RNA
agggacctgaaggtaagccc

SEQ ID NO: 5206 - RNA, 20 nt, synthetic construct
  source 1..20: mol_type = other RNA
gctgagaacctcttgctgga

SEQ ID NO: 5207 - RNA, 20 nt, synthetic construct
  source 1..20: mol_type = other RNA
gagaacctcttgctggatgc

SEQ ID NO: 5208 - RNA, 20 nt, synthetic construct
  source 1..20: mol_type = other RNA
ggctgagaacctcttgctgg

SEQ ID NO: 5209 - RNA, 20 nt, synthetic construct
  source 1..20: mol_type = other RNA
ctgagaacctcttgctggat

SEQ ID NO: 5210 - RNA, 20 nt, synthetic construct
  source 1..20: mol_type = other RNA
tgagaacctcttgctggatg

SEQ ID NO: 5211 - RNA, 20 nt, synthetic construct
  source 1..20: mol_type = other RNA
agaacctcttgctggatgcc

SEQ ID NO: 5212 - RNA, 20 nt, synthetic construct
  source 1..20: mol_type = other RNA
tgccatcaagattatcgaca

SEQ ID NO: 5213 - RNA, 20 nt, synthetic construct
  source 1..20: mol_type = other RNA
gccatcaagattatcgacaa

SEQ ID NO: 5214 - RNA, 20 nt, synthetic construct
  source 1..20: mol_type = other RNA
ccatcaagattatcgacaaa

SEQ ID NO: 5215 - RNA, 20 nt, synthetic construct
  source 1..20: mol_type = other RNA
catcaagattatcgacaaaa

SEQ ID NO: 5216 - RNA, 20 nt, synthetic construct
  source 1..20: mol_type = other RNA
atcaagattatcgacaaaac

SEQ ID NO: 5217 - RNA, 20 nt, synthetic construct
  source 1..20: mol_type = other RNA
tcaagattatcgacaaaacc

SEQ ID NO: 5218 - RNA, 20 nt, synthetic construct
  source 1..20: mol_type = other RNA
cacagatttcggcctctcca

SEQ ID NO: 5219 - RNA, 20 nt, synthetic construct
  source 1..20: mol_type = other RNA
ctcacagatttcggcctctc

SEQ ID NO: 5220 - RNA, 20 nt, synthetic construct
  source 1..20: mol_type = other RNA
tcacagatttcggcctctcc

SEQ ID NO: 5221 - RNA, 20 nt, synthetic construct
  source 1..20: mol_type = other RNA
acagatttcggcctctccaa

SEQ ID NO: 5222 - RNA, 20 nt, synthetic construct
  source 1..20: mol_type = other RNA
cagatttcggcctctccaag

SEQ ID NO: 5223 - RNA, 20 nt, synthetic construct
  source 1..20: mol_type = other RNA
ccgcgacctcaagcctgaca

SEQ ID NO: 5224 - RNA, 20 nt, synthetic construct
  source 1..20: mol_type = other RNA
gcgacctcaagcctgacaag

SEQ ID NO: 5225 - RNA, 20 nt, synthetic construct
  source 1..20: mol_type = other RNA
caccgcgacctcaagcctga

SEQ ID NO: 5226 - RNA, 20 nt, synthetic construct
  source 1..20: mol_type = other RNA
accgcgacctcaagcctgac

SEQ ID NO: 5227 - RNA, 20 nt, synthetic construct
  source 1..20: mol_type = other RNA
cgcgacctcaagcctgacaa

SEQ ID NO: 5228 - RNA, 20 nt, synthetic construct
  source 1..20: mol_type = other RNA
gcctgacaagtgagctttga

SEQ ID NO: 5229 - RNA, 20 nt, synthetic construct
  source 1..20: mol_type = other RNA
cctgacaagtgagctttgat

SEQ ID NO: 5230 - RNA, 20 nt, synthetic construct
  source 1..20: mol_type = other RNA
ctgacaagtgagctttgatc

SEQ ID NO: 5231 - RNA, 20 nt, synthetic construct
  source 1..20: mol_type = other RNA
tgacaagtgagctttgatct

SEQ ID NO: 5232 - RNA, 20 nt, synthetic construct
  source 1..20: mol_type = other RNA
gacaagtgagctttgatctt

SEQ ID NO: 5233 - RNA, 20 nt, synthetic construct
  source 1..20: mol_type = other RNA
acaagtgagctttgatcttt

SEQ ID NO: 5234 - RNA, 20 nt, synthetic construct
  source 1..20: mol_type = other RNA
ctcacggactttggactgtc

SEQ ID NO: 5235 - RNA, 20 nt, synthetic construct
  source 1..20: mol_type = other RNA
tcacggactttggactgtcc

SEQ ID NO: 5236 - RNA, 20 nt, synthetic construct
  source 1..20: mol_type = other RNA
cacggactttggactgtcca

SEQ ID NO: 5237 - RNA, 20 nt, synthetic construct
  source 1..20: mol_type = other RNA
acggactttggactgtccaa

SEQ ID NO: 5238 - RNA, 20 nt, synthetic construct
  source 1..20: mol_type = other RNA
cggactttggactgtccaaa

SEQ ID NO: 5239 - RNA, 20 nt, synthetic construct
  source 1..20: mol_type = other RNA
ccgtgacctcaagcctgaca

SEQ ID NO: 5240 - RNA, 20 nt, synthetic construct
  source 1..20: mol_type = other RNA
caccgtgacctcaagcctga

SEQ ID NO: 5241 - RNA, 20 nt, synthetic construct
  source 1..20: mol_type = other RNA
accgtgacctcaagcctgac

SEQ ID NO: 5242 - RNA, 20 nt, synthetic construct
  source 1..20: mol_type = other RNA
cgtgacctcaagcctgacaa

SEQ ID NO: 5243 - RNA, 20 nt, synthetic construct
  source 1..20: mol_type = other RNA
gtgacctcaagcctgacaag

SEQ ID NO: 5244 - RNA, 20 nt, synthetic construct
  source 1..20: mol_type = other RNA
tgacaagtatgtccacagtc

SEQ ID NO: 5245 - RNA, 20 nt, synthetic construct
  source 1..20: mol_type = other RNA
acaagtatgtccacagtctg

SEQ ID NO: 5246 - RNA, 20 nt, synthetic construct
  source 1..20: mol_type = other RNA
gcctgacaagtatgtccaca

SEQ ID NO: 5247 - RNA, 20 nt, synthetic construct
  source 1..20: mol_type = other RNA
cctgacaagtatgtccacag

SEQ ID NO: 5248 - RNA, 20 nt, synthetic construct
  source 1..20: mol_type = other RNA
ctgacaagtatgtccacagt

SEQ ID NO: 5249 - RNA, 20 nt, synthetic construct
  source 1..20: mol_type = other RNA
gacaagtatgtccacagtct

SEQ ID NO: 5250 - RNA, 20 nt, synthetic construct
  source 1..20: mol_type = other RNA
tgccatgaagaagatcaaca

SEQ ID NO: 5251 - RNA, 20 nt, synthetic construct
  source 1..20: mol_type = other RNA
catgaagaagatcaacaagc

SEQ ID NO: 5252 - RNA, 20 nt, synthetic construct
  source 1..20: mol_type = other RNA
gccatgaagaagatcaacaa

SEQ ID NO: 5253 - RNA, 20 nt, synthetic construct
  source 1..20: mol_type = other RNA
ccatgaagaagatcaacaag

SEQ ID NO: 5254 - RNA, 20 nt, synthetic construct
  source 1..20: mol_type = other RNA
atgaagaagatcaacaagca

SEQ ID NO: 5255 - RNA, 20 nt, synthetic construct
  source 1..20: mol_type = other RNA
tgaagaagatcaacaagcag

SEQ ID NO: 5256 - RNA, 20 nt, synthetic construct
  source 1..20: mol_type = other RNA
cacggacttcggcctgtcca

SEQ ID NO: 5257 - RNA, 20 nt, synthetic construct
  source 1..20: mol_type = other RNA
ctcacggacttcggcctgtc

SEQ ID NO: 5258 - RNA, 20 nt, synthetic construct
  source 1..20: mol_type = other RNA
tcacggacttcggcctgtcc

SEQ ID NO: 5259 - RNA, 20 nt, synthetic construct
  source 1..20: mol_type = other RNA
acggacttcggcctgtccaa

SEQ ID NO: 5260 - RNA, 20 nt, synthetic construct
  source 1..20: mol_type = other RNA
cggacttcggcctgtccaag

SEQ ID NO: 5261 - RNA, 20 nt, synthetic construct
  source 1..20: mol_type = other RNA
ccgtgacctcaaaccagaca

SEQ ID NO: 5262 - RNA, 20 nt, synthetic construct
  source 1..20: mol_type = other RNA
gtgacctcaaaccagacaag

SEQ ID NO: 5263 - RNA, 20 nt, synthetic construct
  source 1..20: mol_type = other RNA
caccgtgacctcaaaccaga

SEQ ID NO: 5264 - RNA, 20 nt, synthetic construct
  source 1..20: mol_type = other RNA
accgtgacctcaaaccagac

SEQ ID NO: 5265 - RNA, 20 nt, synthetic construct
  source 1..20: mol_type = other RNA
cgtgacctcaaaccagacaa

SEQ ID NO: 5266 - RNA, 20 nt, synthetic construct
  source 1..20: mol_type = other RNA
ccagacaagtgagctgagct

SEQ ID NO: 5267 - RNA, 20 nt, synthetic construct
  source 1..20: mol_type = other RNA
acaagtgagctgagctagca

SEQ ID NO: 5268 - RNA, 20 nt, synthetic construct
  source 1..20: mol_type = other RNA
accagacaagtgagctgagc

SEQ ID NO: 5269 - RNA, 20 nt, synthetic construct
  source 1..20: mol_type = other RNA
cagacaagtgagctgagcta

SEQ ID NO: 5270 - RNA, 20 nt, synthetic construct
  source 1..20: mol_type = other RNA
agacaagtgagctgagctag

SEQ ID NO: 5271 - RNA, 20 nt, synthetic construct
  source 1..20: mol_type = other RNA
gacaagtgagctgagctagc

SEQ ID NO: 5272 - RNA, 20 nt, synthetic construct
  source 1..20: mol_type = other RNA
catcaagaagatcaacaaac

SEQ ID NO: 5273 - RNA, 20 nt, synthetic construct
  source 1..20: mol_type = other RNA
tgccatcaagaagatcaaca

SEQ ID NO: 5274 - RNA, 20 nt, synthetic construct
  source 1..20: mol_type = other RNA
gccatcaagaagatcaacaa

SEQ ID NO: 5275 - RNA, 20 nt, synthetic construct
  source 1..20: mol_type = other RNA
ccatcaagaagatcaacaaa

SEQ ID NO: 5276 - RNA, 20 nt, synthetic construct
  source 1..20: mol_type = other RNA
atcaagaagatcaacaaaca

SEQ ID NO: 5277 - RNA, 20 nt, synthetic construct
  source 1..20: mol_type = other RNA
tcaagaagatcaacaaacag

SEQ ID NO: 5278 - RNA, 20 nt, synthetic construct
  source 1..20: mol_type = other RNA
cagggatttgaaaccagaca

SEQ ID NO: 5279 - RNA, 20 nt, synthetic construct
  source 1..20: mol_type = other RNA
cacagggatttgaaaccaga

SEQ ID NO: 5280 - RNA, 20 nt, synthetic construct
  source 1..20: mol_type = other RNA
acagggatttgaaaccagac

SEQ ID NO: 5281 - RNA, 20 nt, synthetic construct
  source 1..20: mol_type = other RNA
agggatttgaaaccagacaa

SEQ ID NO: 5282 - RNA, 20 nt, synthetic construct
  source 1..20: mol_type = other RNA
gggatttgaaaccagacaag

SEQ ID NO: 5283 - RNA, 20 nt, synthetic construct
  source 1..20: mol_type = other RNA
cagacaagtatgtacacaaa

SEQ ID NO: 5284 - RNA, 20 nt, synthetic construct
  source 1..20: mol_type = other RNA
accagacaagtatgtacaca

SEQ ID NO: 5285 - RNA, 20 nt, synthetic construct
  source 1..20: mol_type = other RNA
ccagacaagtatgtacacaa

SEQ ID NO: 5286 - RNA, 20 nt, synthetic construct
  source 1..20: mol_type = other RNA
agacaagtatgtacacaaat

SEQ ID NO: 5287 - RNA, 20 nt, synthetic construct
  source 1..20: mol_type = other RNA
gacaagtatgtacacaaatg

SEQ ID NO: 5288 - RNA, 20 nt, synthetic construct
  source 1..20: mol_type = other RNA
acaagtatgtacacaaatga

SEQ ID NO: 5289 - RNA, 20 nt, synthetic construct
  source 1..20: mol_type = other RNA
catgaagaagattaataaac

SEQ ID NO: 5290 - RNA, 20 nt, synthetic construct
  source 1..20: mol_type = other RNA
tgccatgaagaagattaata

SEQ ID NO: 5291 - RNA, 20 nt, synthetic construct
  source 1..20: mol_type = other RNA
gccatgaagaagattaataa

SEQ ID NO: 5292 - RNA, 20 nt, synthetic construct
  source 1..20: mol_type = other RNA
ccatgaagaagattaataaa

SEQ ID NO: 5293 - RNA, 20 nt, synthetic construct
  source 1..20: mol_type = other RNA
atgaagaagattaataaaca

SEQ ID NO: 5294 - RNA, 20 nt, synthetic construct
  source 1..20: mol_type = other RNA
tgaagaagattaataaacag

SEQ ID NO: 5295 - RNA, 20 nt, synthetic construct
  source 1..20: mol_type = other RNA
tgcagggacttgaaaccgga

SEQ ID NO: 5296 - RNA, 20 nt, synthetic construct
  source 1..20: mol_type = other RNA
gcagggacttgaaaccggac

SEQ ID NO: 5297 - RNA, 20 nt, synthetic construct
  source 1..20: mol_type = other RNA
cagggacttgaaaccggaca

SEQ ID NO: 5298 - RNA, 20 nt, synthetic construct
  source 1..20: mol_type = other RNA
agggacttgaaaccggacaa

SEQ ID NO: 5299 - RNA, 20 nt, synthetic construct
  source 1..20: mol_type = other RNA
gggacttgaaaccggacaat

SEQ ID NO: 5300 - RNA, 20 nt, synthetic construct
  source 1..20: mol_type = other RNA
gacaatatgcttatttctaa

SEQ ID NO: 5301 - RNA, 20 nt, synthetic construct
  source 1..20: mol_type = other RNA
accggacaatatgcttattt

SEQ ID NO: 5302 - RNA, 20 nt, synthetic construct
  source 1..20: mol_type = other RNA
ccggacaatatgcttatttc

SEQ ID NO: 5303 - RNA, 20 nt, synthetic construct
  source 1..20: mol_type = other RNA
cggacaatatgcttatttct

SEQ ID NO: 5304 - RNA, 20 nt, synthetic construct
  source 1..20: mol_type = other RNA
ggacaatatgcttatttcta

SEQ ID NO: 5305 - RNA, 20 nt, synthetic construct
  source 1..20: mol_type = other RNA
acaatatgcttatttctaat

SEQ ID NO: 5306 - RNA, 20 nt, synthetic construct
  source 1..20: mol_type = other RNA
cagtaaaggtaggaagtcaa

SEQ ID NO: 5307 - RNA, 20 nt, synthetic construct
  source 1..20: mol_type = other RNA
gtaaaggtaggaagtcaacg

SEQ ID NO: 5308 - RNA, 20 nt, synthetic construct
  source 1..20: mol_type = other RNA
tgcagtaaaggtaggaagtc

SEQ ID NO: 5309 - RNA, 20 nt, synthetic construct
  source 1..20: mol_type = other RNA
gcagtaaaggtaggaagtca

SEQ ID NO: 5310 - RNA, 20 nt, synthetic construct
  source 1..20: mol_type = other RNA
agtaaaggtaggaagtcaac

SEQ ID NO: 5311 - RNA, 20 nt, synthetic construct
  source 1..20: mol_type = other RNA
taaaggtaggaagtcaacga

SEQ ID NO: 5312 - RNA, 20 nt, synthetic construct
  source 1..20: mol_type = other RNA
agcgactttggcctggccaa

SEQ ID NO: 5313 - RNA, 20 nt, synthetic construct
  source 1..20: mol_type = other RNA
gcgactttggcctggccaaa

SEQ ID NO: 5314 - RNA, 20 nt, synthetic construct
  source 1..20: mol_type = other RNA
cagcgactttggcctggcca

SEQ ID NO: 5315 - RNA, 20 nt, synthetic construct
  source 1..20: mol_type = other RNA
tcagcgactttggcctggcc

SEQ ID NO: 5316 - RNA, 20 nt, synthetic construct
  source 1..20: mol_type = other RNA
gtcagcgactttggcctggc

SEQ ID NO: 5317 - RNA, 20 nt, synthetic construct
  source 1..20: mol_type = other RNA
gcgacctggccgcccgcaac

SEQ ID NO: 5318 - RNA, 20 nt, synthetic construct
  source 1..20: mol_type = other RNA
cgcgacctggccgcccgcaa

SEQ ID NO: 5319 - RNA, 20 nt, synthetic construct
  source 1..20: mol_type = other RNA
ccgcgacctggccgcccgca

SEQ ID NO: 5320 - RNA, 20 nt, synthetic construct
  source 1..20: mol_type = other RNA
accgcgacctggccgcccgc

SEQ ID NO: 5321 - RNA, 20 nt, synthetic construct
  source 1..20: mol_type = other RNA
caccgcgacctggccgcccg

SEQ ID NO: 5322 - RNA, 20 nt, synthetic construct
  source 1..20: mol_type = other RNA
cgcaacatcctggtctcaga

SEQ ID NO: 5323 - RNA, 20 nt, synthetic construct
  source 1..20: mol_type = other RNA
ccgcaacatcctggtctcag

SEQ ID NO: 5324 - RNA, 20 nt, synthetic construct
  source 1..20: mol_type = other RNA
gcccgcaacatcctggtctc

SEQ ID NO: 5325 - RNA, 20 nt, synthetic construct
  source 1..20: mol_type = other RNA
gcaacatcctggtctcagag

SEQ ID NO: 5326 - RNA, 20 nt, synthetic construct
  source 1..20: mol_type = other RNA
cccgcaacatcctggtctca

SEQ ID NO: 5327 - RNA, 20 nt, synthetic construct
  source 1..20: mol_type = other RNA
cgcccgcaacatcctggtct

SEQ ID NO: 5328 - RNA, 20 nt, synthetic construct
  source 1..20: mol_type = other RNA
gtgaagaatatcaagtgtga

SEQ ID NO: 5329 - RNA, 20 nt, synthetic construct
  source 1..20: mol_type = other RNA
gccgtgaagaatatcaagtg

SEQ ID NO: 5330 - RNA, 20 nt, synthetic construct
  source 1..20: mol_type = other RNA
tgaagaatatcaagtgtgat

SEQ ID NO: 5331 - RNA, 20 nt, synthetic construct
  source 1..20: mol_type = other RNA
cgtgaagaatatcaagtgtg

SEQ ID NO: 5332 - RNA, 20 nt, synthetic construct
  source 1..20: mol_type = other RNA
ccgtgaagaatatcaagtgt

SEQ ID NO: 5333 - RNA, 20 nt, synthetic construct
  source 1..20: mol_type = other RNA
ggccgtgaagaatatcaagt

SEQ ID NO: 5334 - RNA, 20 nt, synthetic construct
  source 1..20: mol_type = other RNA
ctgattgactttggtctctg

SEQ ID NO: 5335 - RNA, 20 nt, synthetic construct
  source 1..20: mol_type = other RNA
tgattgactttggtctctgt

SEQ ID NO: 5336 - RNA, 20 nt, synthetic construct
  source 1..20: mol_type = other RNA
gattgactttggtctctgtg

SEQ ID NO: 5337 - RNA, 20 nt, synthetic construct
  source 1..20: mol_type = other RNA
attgactttggtctctgtgc

SEQ ID NO: 5338 - RNA, 20 nt, synthetic construct
  source 1..20: mol_type = other RNA
ttgactttggtctctgtgca

SEQ ID NO: 5339 - RNA, 20 nt, synthetic construct
  source 1..20: mol_type = other RNA
acagggacctcaagccagta

SEQ ID NO: 5340 - RNA, 20 nt, synthetic construct
  source 1..20: mol_type = other RNA
agggacctcaagccagtaag

SEQ ID NO: 5341 - RNA, 20 nt, synthetic construct
  source 1..20: mol_type = other RNA
cacagggacctcaagccagt

SEQ ID NO: 5342 - RNA, 20 nt, synthetic construct
  source 1..20: mol_type = other RNA
cagggacctcaagccagtaa

SEQ ID NO: 5343 - RNA, 20 nt, synthetic construct
  source 1..20: mol_type = other RNA
gggacctcaagccagtaagt

SEQ ID NO: 5344 - RNA, 20 nt, synthetic construct
  source 1..20: mol_type = other RNA
caggaaaatttgctgtttga

SEQ ID NO: 5345 - RNA, 20 nt, synthetic construct
  source 1..20: mol_type = other RNA
ccaggaaaatttgctgtttg

SEQ ID NO: 5346 - RNA, 20 nt, synthetic construct
  source 1..20: mol_type = other RNA
aggaaaatttgctgtttgat

SEQ ID NO: 5347 - RNA, 20 nt, synthetic construct
  source 1..20: mol_type = other RNA
ggaaaatttgctgtttgatg

SEQ ID NO: 5348 - RNA, 20 nt, synthetic construct
  source 1..20: mol_type = other RNA
gaaaatttgctgtttgatga

SEQ ID NO: 5349 - RNA, 20 nt, synthetic construct
  source 1..20: mol_type = other RNA
aaaatttgctgtttgatgaa

SEQ ID NO: 5350 - RNA, 20 nt, synthetic construct
  source 1..20: mol_type = other RNA
tgcggacttcggcctctcta

SEQ ID NO: 5351 - RNA, 20 nt, synthetic construct
  source 1..20: mol_type = other RNA
gttgcggacttcggcctctc

SEQ ID NO: 5352 - RNA, 20 nt, synthetic construct
  source 1..20: mol_type = other RNA
ttgcggacttcggcctctct

SEQ ID NO: 5353 - RNA, 20 nt, synthetic construct
  source 1..20: mol_type = other RNA
gcggacttcggcctctctaa

SEQ ID NO: 5354 - RNA, 20 nt, synthetic construct
  source 1..20: mol_type = other RNA
cggacttcggcctctctaag

SEQ ID NO: 5355 - RNA, 20 nt, synthetic construct
  source 1..20: mol_type = other RNA
gagatttagctgctcgaaac

SEQ ID NO: 5356 - RNA, 20 nt, synthetic construct
  source 1..20: mol_type = other RNA
catcgagatttagctgctcg

SEQ ID NO: 5357 - RNA, 20 nt, synthetic construct
  source 1..20: mol_type = other RNA
atcgagatttagctgctcga

SEQ ID NO: 5358 - RNA, 20 nt, synthetic construct
  source 1..20: mol_type = other RNA
tcgagatttagctgctcgaa

SEQ ID NO: 5359 - RNA, 20 nt, synthetic construct
  source 1..20: mol_type = other RNA
cgagatttagctgctcgaaa

SEQ ID NO: 5360 - RNA, 20 nt, synthetic construct
  source 1..20: mol_type = other RNA
tgctcgaaactgcatgtaag

SEQ ID NO: 5361 - RNA, 20 nt, synthetic construct
  source 1..20: mol_type = other RNA
gctcgaaactgcatgtaaga

SEQ ID NO: 5362 - RNA, 20 nt, synthetic construct
  source 1..20: mol_type = other RNA
ctcgaaactgcatgtaagag

SEQ ID NO: 5363 - RNA, 20 nt, synthetic construct
  source 1..20: mol_type = other RNA
tcgaaactgcatgtaagagt

SEQ ID NO: 5364 - RNA, 20 nt, synthetic construct
  source 1..20: mol_type = other RNA
cgaaactgcatgtaagagtc

SEQ ID NO: 5365 - RNA, 20 nt, synthetic construct
  source 1..20: mol_type = other RNA
gaaactgcatgtaagagtcc

SEQ ID NO: 5366 - RNA, 20 nt, synthetic construct
  source 1..20: mol_type = other RNA
gcagtgaagaccatgaagtg

SEQ ID NO: 5367 - RNA, 20 nt, synthetic construct
  source 1..20: mol_type = other RNA
agtgaagaccatgaagtgtg

SEQ ID NO: 5368 - RNA, 20 nt, synthetic construct
  source 1..20: mol_type = other RNA
ggcagtgaagaccatgaagt

SEQ ID NO: 5369 - RNA, 20 nt, synthetic construct
  source 1..20: mol_type = other RNA
cagtgaagaccatgaagtgt

SEQ ID NO: 5370 - RNA, 20 nt, synthetic construct
  source 1..20: mol_type = other RNA
gtgaagaccatgaagtgtga

SEQ ID NO: 5371 - RNA, 20 nt, synthetic construct
  source 1..20: mol_type = other RNA
tgaagaccatgaagtgtgag

SEQ ID NO: 5372 - RNA, 20 nt, synthetic construct
  source 1..20: mol_type = other RNA
gagacttggctgcaagaaac

SEQ ID NO: 5373 - RNA, 20 nt, synthetic construct
  source 1..20: mol_type = other RNA
cacagagacttggctgcaag

SEQ ID NO: 5374 - RNA, 20 nt, synthetic construct
  source 1..20: mol_type = other RNA
acagagacttggctgcaaga

SEQ ID NO: 5375 - RNA, 20 nt, synthetic construct
  source 1..20: mol_type = other RNA
cagagacttggctgcaagaa

SEQ ID NO: 5376 - RNA, 20 nt, synthetic construct
  source 1..20: mol_type = other RNA
agagacttggctgcaagaaa

SEQ ID NO: 5377 - RNA, 20 nt, synthetic construct
  source 1..20: mol_type = other RNA
agaaactgtatgtaagtatc

SEQ ID NO: 5378 - RNA, 20 nt, synthetic construct
  source 1..20: mol_type = other RNA
tgcaagaaactgtatgtaag

SEQ ID NO: 5379 - RNA, 20 nt, synthetic construct
  source 1..20: mol_type = other RNA
gcaagaaactgtatgtaagt

SEQ ID NO: 5380 - RNA, 20 nt, synthetic construct
  source 1..20: mol_type = other RNA
caagaaactgtatgtaagta

SEQ ID NO: 5381 - RNA, 20 nt, synthetic construct
  source 1..20: mol_type = other RNA
aagaaactgtatgtaagtat

SEQ ID NO: 5382 - RNA, 20 nt, synthetic construct
  source 1..20: mol_type = other RNA
gaaactgtatgtaagtatca

SEQ ID NO: 5383 - RNA, 20 nt, synthetic construct
  source 1..20: mol_type = other RNA
tgtgaaatccttgaacagta

SEQ ID NO: 5384 - RNA, 20 nt, synthetic construct
  source 1..20: mol_type = other RNA
tgaaatccttgaacagtaag

SEQ ID NO: 5385 - RNA, 20 nt, synthetic construct
  source 1..20: mol_type = other RNA
gaaatccttgaacagtaagt

SEQ ID NO: 5386 - RNA, 20 nt, synthetic construct
  source 1..20: mol_type = other RNA
tgctgtgaaatccttgaaca

SEQ ID NO: 5387 - RNA, 20 nt, synthetic construct
  source 1..20: mol_type = other RNA
gctgtgaaatccttgaacag

SEQ ID NO: 5388 - RNA, 20 nt, synthetic construct
  source 1..20: mol_type = other RNA
ctgtgaaatccttgaacagt

SEQ ID NO: 5389 - RNA, 20 nt, synthetic construct
  source 1..20: mol_type = other RNA
gtgaaatccttgaacagtaa

SEQ ID NO: 5390 - RNA, 20 nt, synthetic construct
  source 1..20: mol_type = other RNA
cgagacatcaaggggcagaa

SEQ ID NO: 5391 - RNA, 20 nt, synthetic construct
  source 1..20: mol_type = other RNA
catcgagacatcaaggggca

SEQ ID NO: 5392 - RNA, 20 nt, synthetic construct
  source 1..20: mol_type = other RNA
atcgagacatcaaggggcag

SEQ ID NO: 5393 - RNA, 20 nt, synthetic construct
  source 1..20: mol_type = other RNA
tcgagacatcaaggggcaga

SEQ ID NO: 5394 - RNA, 20 nt, synthetic construct
  source 1..20: mol_type = other RNA
gagacatcaaggggcagaat

SEQ ID NO: 5395 - RNA, 20 nt, synthetic construct
  source 1..20: mol_type = other RNA
gggcagaatgtgctgctgac

SEQ ID NO: 5396 - RNA, 20 nt, synthetic construct
  source 1..20: mol_type = other RNA
gcagaatgtgctgctgacag

SEQ ID NO: 5397 - RNA, 20 nt, synthetic construct
  source 1..20: mol_type = other RNA
ggggcagaatgtgctgctga

SEQ ID NO: 5398 - RNA, 20 nt, synthetic construct
  source 1..20: mol_type = other RNA
ggcagaatgtgctgctgaca

SEQ ID NO: 5399 - RNA, 20 nt, synthetic construct
  source 1..20: mol_type = other RNA
cagaatgtgctgctgacaga

SEQ ID NO: 5400 - RNA, 20 nt, synthetic construct
  source 1..20: mol_type = other RNA
agaatgtgctgctgacagag

SEQ ID NO: 5401 - RNA, 20 nt, synthetic construct
  source 1..20: mol_type = other RNA
catcaaggtcatggatgtca

SEQ ID NO: 5402 - RNA, 20 nt, synthetic construct
  source 1..20: mol_type = other RNA
atcaaggtcatggatgtcac

SEQ ID NO: 5403 - RNA, 20 nt, synthetic construct
  source 1..20: mol_type = other RNA
tgccatcaaggtcatggatg

SEQ ID NO: 5404 - RNA, 20 nt, synthetic construct
  source 1..20: mol_type = other RNA
gccatcaaggtcatggatgt

SEQ ID NO: 5405 - RNA, 20 nt, synthetic construct
  source 1..20: mol_type = other RNA
ccatcaaggtcatggatgtc

SEQ ID NO: 5406 - RNA, 20 nt, synthetic construct
  source 1..20: mol_type = other RNA
tcaaggtcatggatgtcacg

SEQ ID NO: 5407 - RNA, 20 nt, synthetic construct
  source 1..20: mol_type = other RNA
gtgactttgacttgggcagt

SEQ ID NO: 5408 - RNA, 20 nt, synthetic construct
  source 1..20: mol_type = other RNA
tgtgactttgacttgggcag

SEQ ID NO: 5409 - RNA, 20 nt, synthetic construct
  source 1..20: mol_type = other RNA
tctgtgactttgacttgggc

SEQ ID NO: 5410 - RNA, 20 nt, synthetic construct
  source 1..20: mol_type = other RNA
ctgtgactttgacttgggca

SEQ ID NO: 5411 - RNA, 20 nt, synthetic construct
  source 1..20: mol_type = other RNA
atctgtgactttgacttggg

SEQ ID NO: 5412 - RNA, 20 nt, synthetic construct
  source 1..20: mol_type = other RNA
gtgatctgaaaccagaaaat

SEQ ID NO: 5413 - RNA, 20 nt, synthetic construct
  source 1..20: mol_type = other RNA
cgtgatctgaaaccagaaaa

SEQ ID NO: 5414 - RNA, 20 nt, synthetic construct
  source 1..20: mol_type = other RNA
tcgtgatctgaaaccagaaa

SEQ ID NO: 5415 - RNA, 20 nt, synthetic construct
  source 1..20: mol_type = other RNA
atcgtgatctgaaaccagaa

SEQ ID NO: 5416 - RNA, 20 nt, synthetic construct
  source 1..20: mol_type = other RNA
catcgtgatctgaaaccaga

SEQ ID NO: 5417 - RNA, 20 nt, synthetic construct
  source 1..20: mol_type = other RNA
aaaatatattgtgtgaatct

SEQ ID NO: 5418 - RNA, 20 nt, synthetic construct
  source 1..20: mol_type = other RNA
gaaaatatattgtgtgaatc

SEQ ID NO: 5419 - RNA, 20 nt, synthetic construct
  source 1..20: mol_type = other RNA
agaaaatatattgtgtgaat

SEQ ID NO: 5420 - RNA, 20 nt, synthetic construct
  source 1..20: mol_type = other RNA
cagaaaatatattgtgtgaa

SEQ ID NO: 5421 - RNA, 20 nt, synthetic construct
  source 1..20: mol_type = other RNA
ccagaaaatatattgtgtga

SEQ ID NO: 5422 - RNA, 20 nt, synthetic construct
  source 1..20: mol_type = other RNA
accagaaaatatattgtgtg

SEQ ID NO: 5423 - RNA, 20 nt, synthetic construct
  source 1..20: mol_type = other RNA
gtcaaagtgagtgtctcagc

SEQ ID NO: 5424 - RNA, 20 nt, synthetic construct
  source 1..20: mol_type = other RNA
gccgtcaaagtgagtgtctc

SEQ ID NO: 5425 - RNA, 20 nt, synthetic construct
  source 1..20: mol_type = other RNA
caaagtgagtgtctcagctg

SEQ ID NO: 5426 - RNA, 20 nt, synthetic construct
  source 1..20: mol_type = other RNA
tcaaagtgagtgtctcagct

SEQ ID NO: 5427 - RNA, 20 nt, synthetic construct
  source 1..20: mol_type = other RNA
cgtcaaagtgagtgtctcag

SEQ ID NO: 5428 - RNA, 20 nt, synthetic construct
  source 1..20: mol_type = other RNA
ccgtcaaagtgagtgtctca

SEQ ID NO: 5429 - RNA, 20 nt, synthetic construct
  source 1..20: mol_type = other RNA
tgccgtcaaagtgagtgtct

SEQ ID NO: 5430 - RNA, 20 nt, synthetic construct
  source 1..20: mol_type = other RNA
gtgacttcgacctgggcagc

SEQ ID NO: 5431 - RNA, 20 nt, synthetic construct
  source 1..20: mol_type = other RNA
tgtgacttcgacctgggcag

SEQ ID NO: 5432 - RNA, 20 nt, synthetic construct
  source 1..20: mol_type = other RNA
tctgtgacttcgacctgggc

SEQ ID NO: 5433 - RNA, 20 nt, synthetic construct
  source 1..20: mol_type = other RNA
ctgtgacttcgacctgggca

SEQ ID NO: 5434 - RNA, 20 nt, synthetic construct
  source 1..20: mol_type = other RNA
atctgtgacttcgacctggg

SEQ ID NO: 5435 - RNA, 20 nt, synthetic construct
  source 1..20: mol_type = other RNA
gggacctaaagccggaaaac

SEQ ID NO: 5436 - RNA, 20 nt, synthetic construct
  source 1..20: mol_type = other RNA
agggacctaaagccggaaaa

SEQ ID NO: 5437 - RNA, 20 nt, synthetic construct
  source 1..20: mol_type = other RNA
cagggacctaaagccggaaa

SEQ ID NO: 5438 - RNA, 20 nt, synthetic construct
  source 1..20: mol_type = other RNA
acagggacctaaagccggaa

SEQ ID NO: 5439 - RNA, 20 nt, synthetic construct
  source 1..20: mol_type = other RNA
cacagggacctaaagccgga

SEQ ID NO: 5440 - RNA, 20 nt, synthetic construct
  source 1..20: mol_type = other RNA
gccggaaaacatcctctgtg

SEQ ID NO: 5441 - RNA, 20 nt, synthetic construct
  source 1..20: mol_type = other RNA
aaaacatcctctgtgagcac

SEQ ID NO: 5442 - RNA, 20 nt, synthetic construct
  source 1..20: mol_type = other RNA
gaaaacatcctctgtgagca

SEQ ID NO: 5443 - RNA, 20 nt, synthetic construct
  source 1..20: mol_type = other RNA
ggaaaacatcctctgtgagc

SEQ ID NO: 5444 - RNA, 20 nt, synthetic construct
  source 1..20: mol_type = other RNA
cggaaaacatcctctgtgag

SEQ ID NO: 5445 - RNA, 20 nt, synthetic construct
  source 1..20: mol_type = other RNA
ccggaaaacatcctctgtga

SEQ ID NO: 5446 - RNA, 20 nt, synthetic construct
  source 1..20: mol_type = other RNA
gtcaaggtgggcccgcgccg

SEQ ID NO: 5447 - RNA, 20 nt, synthetic construct
  source 1..20: mol_type = other RNA
ccgtcaaggtgggcccgcgc

SEQ ID NO: 5448 - RNA, 20 nt, synthetic construct
  source 1..20: mol_type = other RNA
tcaaggtgggcccgcgccgc

SEQ ID NO: 5449 - RNA, 20 nt, synthetic construct
  source 1..20: mol_type = other RNA
cgtcaaggtgggcccgcgcc

SEQ ID NO: 5450 - RNA, 20 nt, synthetic construct
  source 1..20: mol_type = other RNA
gccgtcaaggtgggcccgcg

SEQ ID NO: 5451 - RNA, 20 nt, synthetic construct
  source 1..20: mol_type = other RNA
cgccgtcaaggtgggcccgc

SEQ ID NO: 5452 - RNA, 20 nt, synthetic construct
  source 1..20: mol_type = other RNA
caaacttcctggtaactcaa

SEQ ID NO: 5453 - RNA, 20 nt, synthetic construct
  source 1..20: mol_type = other RNA
tcaaacttcctggtaactca

SEQ ID NO: 5454 - RNA, 20 nt, synthetic construct
  source 1..20: mol_type = other RNA
ctcaaacttcctggtaactc

SEQ ID NO: 5455 - RNA, 20 nt, synthetic construct
  source 1..20: mol_type = other RNA
gctcaaacttcctggtaact

SEQ ID NO: 5456 - RNA, 20 nt, synthetic construct
  source 1..20: mol_type = other RNA
agctcaaacttcctggtaac

SEQ ID NO: 5457 - RNA, 20 nt, synthetic construct
  source 1..20: mol_type = other RNA
aagctcaaacttcctggtaa

SEQ ID NO: 5458 - RNA, 20 nt, synthetic construct
  source 1..20: mol_type = other RNA
ggccataaaagtattcaaaa

SEQ ID NO: 5459 - RNA, 20 nt, synthetic construct
  source 1..20: mol_type = other RNA
gggactttggctcctgccgg

SEQ ID NO: 5460 - RNA, 20 nt, synthetic construct
  source 1..20: mol_type = other RNA
aggggactttggctcctgcc

SEQ ID NO: 5461 - RNA, 20 nt, synthetic construct
  source 1..20: mol_type = other RNA
taggggactttggctcctgc

SEQ ID NO: 5462 - RNA, 20 nt, synthetic construct
  source 1..20: mol_type = other RNA
ggggactttggctcctgccg

SEQ ID NO: 5463 - RNA, 20 nt, synthetic construct
  source 1..20: mol_type = other RNA
ttaggggactttggctcctg

SEQ ID NO: 5464 - RNA, 20 nt, synthetic construct
  source 1..20: mol_type = other RNA
gagatgtaaaaccagaaaat

SEQ ID NO: 5465 - RNA, 20 nt, synthetic construct
  source 1..20: mol_type = other RNA
agagatgtaaaaccagaaaa

SEQ ID NO: 5466 - RNA, 20 nt, synthetic construct
  source 1..20: mol_type = other RNA
cagagatgtaaaaccagaaa

SEQ ID NO: 5467 - RNA, 20 nt, synthetic construct
  source 1..20: mol_type = other RNA
acagagatgtaaaaccagaa

SEQ ID NO: 5468 - RNA, 20 nt, synthetic construct
  source 1..20: mol_type = other RNA
cacagagatgtaaaaccaga

SEQ ID NO: 5469 - RNA, 20 nt, synthetic construct
  source 1..20: mol_type = other RNA
aaaatatactaataaaggta

SEQ ID NO: 5470 - RNA, 20 nt, synthetic construct
  source 1..20: mol_type = other RNA
ccagaaaatatactaataaa

SEQ ID NO: 5471 - RNA, 20 nt, synthetic construct
  source 1..20: mol_type = other RNA
accagaaaatatactaataa

SEQ ID NO: 5472 - RNA, 20 nt, synthetic construct
  source 1..20: mol_type = other RNA
gaaaatatactaataaaggt

SEQ ID NO: 5473 - RNA, 20 nt, synthetic construct
  source 1..20: mol_type = other RNA
agaaaatatactaataaagg

SEQ ID NO: 5474 - RNA, 20 nt, synthetic construct
  source 1..20: mol_type = other RNA
cagaaaatatactaataaag

SEQ ID NO: 5475 - RNA, 20 nt, synthetic construct
  source 1..20: mol_type = other RNA
catgtaaacaaatgaagcag

SEQ ID NO: 5476 - RNA, 20 nt, synthetic construct
  source 1..20: mol_type = other RNA
tgcatgtaaacaaatgaagc

SEQ ID NO: 5477 - RNA, 20 nt, synthetic construct
  source 1..20: mol_type = other RNA
taaacaaatgaagcagcgct

SEQ ID NO: 5478 - RNA, 20 nt, synthetic construct
  source 1..20: mol_type = other RNA
gtaaacaaatgaagcagcgc

SEQ ID NO: 5479 - RNA, 20 nt, synthetic construct
  source 1..20: mol_type = other RNA
tgtaaacaaatgaagcagcg

SEQ ID NO: 5480 - RNA, 20 nt, synthetic construct
  source 1..20: mol_type = other RNA
atgtaaacaaatgaagcagc

SEQ ID NO: 5481 - RNA, 20 nt, synthetic construct
  source 1..20: mol_type = other RNA
gcatgtaaacaaatgaagca

SEQ ID NO: 5482 - RNA, 20 nt, synthetic construct
  source 1..20: mol_type = other RNA
tagtgacttcggttgctctg

SEQ ID NO: 5483 - RNA, 20 nt, synthetic construct
  source 1..20: mol_type = other RNA
attagtgacttcggttgctc

SEQ ID NO: 5484 - RNA, 20 nt, synthetic construct
  source 1..20: mol_type = other RNA
gtgacttcggttgctctgag

SEQ ID NO: 5485 - RNA, 20 nt, synthetic construct
  source 1..20: mol_type = other RNA
agtgacttcggttgctctga

SEQ ID NO: 5486 - RNA, 20 nt, synthetic construct
  source 1..20: mol_type = other RNA
ttagtgacttcggttgctct

SEQ ID NO: 5487 - RNA, 20 nt, synthetic construct
  source 1..20: mol_type = other RNA
tggacctgaagcccgcgaac

SEQ ID NO: 5488 - RNA, 20 nt, synthetic construct
  source 1..20: mol_type = other RNA
ttggacctgaagcccgcgaa

SEQ ID NO: 5489 - RNA, 20 nt, synthetic construct
  source 1..20: mol_type = other RNA
cttggacctgaagcccgcga

SEQ ID NO: 5490 - RNA, 20 nt, synthetic construct
  source 1..20: mol_type = other RNA
acttggacctgaagcccgcg

SEQ ID NO: 5491 - RNA, 20 nt, synthetic construct
  source 1..20: mol_type = other RNA
cacttggacctgaagcccgc

SEQ ID NO: 5492 - RNA, 20 nt, synthetic construct
  source 1..20: mol_type = other RNA
cgcgaacatcttgatcagtg

SEQ ID NO: 5493 - RNA, 20 nt, synthetic construct
  source 1..20: mol_type = other RNA
cccgcgaacatcttgatcag

SEQ ID NO: 5494 - RNA, 20 nt, synthetic construct
  source 1..20: mol_type = other RNA
cgaacatcttgatcagtgag

SEQ ID NO: 5495 - RNA, 20 nt, synthetic construct
  source 1..20: mol_type = other RNA
gcgaacatcttgatcagtga

SEQ ID NO: 5496 - RNA, 20 nt, synthetic construct
  source 1..20: mol_type = other RNA
ccgcgaacatcttgatcagt

SEQ ID NO: 5497 - RNA, 20 nt, synthetic construct
  source 1..20: mol_type = other RNA
gcccgcgaacatcttgatca

SEQ ID NO: 5498 - RNA, 20 nt, synthetic construct
  source 1..20: mol_type = other RNA
ccataaagcaagtgaacaag

SEQ ID NO: 5499 - RNA, 20 nt, synthetic construct
  source 1..20: mol_type = other RNA
ggccataaagcaagtgaaca

SEQ ID NO: 5500 - RNA, 20 nt, synthetic construct
  source 1..20: mol_type = other RNA
taaagcaagtgaacaagtgc

SEQ ID NO: 5501 - RNA, 20 nt, synthetic construct
  source 1..20: mol_type = other RNA
ataaagcaagtgaacaagtg

SEQ ID NO: 5502 - RNA, 20 nt, synthetic construct
  source 1..20: mol_type = other RNA
cataaagcaagtgaacaagt

SEQ ID NO: 5503 - RNA, 20 nt, synthetic construct
  source 1..20: mol_type = other RNA
gccataaagcaagtgaacaa

SEQ ID NO: 5504 - RNA, 20 nt, synthetic construct
  source 1..20: mol_type = other RNA
gctgactttggtttggcccg

SEQ ID NO: 5505 - RNA, 20 nt, synthetic construct
  source 1..20: mol_type = other RNA
tggctgactttggtttggcc

SEQ ID NO: 5506 - RNA, 20 nt, synthetic construct
  source 1..20: mol_type = other RNA
ctgactttggtttggcccgc

SEQ ID NO: 5507 - RNA, 20 nt, synthetic construct
  source 1..20: mol_type = other RNA
ggctgactttggtttggccc

SEQ ID NO: 5508 - RNA, 20 nt, synthetic construct
  source 1..20: mol_type = other RNA
gtggctgactttggtttggc

SEQ ID NO: 5509 - RNA, 20 nt, synthetic construct
  source 1..20: mol_type = other RNA
gggacctggctgcgcggaac

SEQ ID NO: 5510 - RNA, 20 nt, synthetic construct
  source 1..20: mol_type = other RNA
agggacctggctgcgcggaa

SEQ ID NO: 5511 - RNA, 20 nt, synthetic construct
  source 1..20: mol_type = other RNA
cagggacctggctgcgcgga

SEQ ID NO: 5512 - RNA, 20 nt, synthetic construct
  source 1..20: mol_type = other RNA
acagggacctggctgcgcgg

SEQ ID NO: 5513 - RNA, 20 nt, synthetic construct
  source 1..20: mol_type = other RNA
cacagggacctggctgcgcg

SEQ ID NO: 5514 - RNA, 20 nt, synthetic construct
  source 1..20: mol_type = other RNA
ggaactgcatgtgagagtcc

SEQ ID NO: 5515 - RNA, 20 nt, synthetic construct
  source 1..20: mol_type = other RNA
tgcgcggaactgcatgtgag

SEQ ID NO: 5516 - RNA, 20 nt, synthetic construct
  source 1..20: mol_type = other RNA
cggaactgcatgtgagagtc

SEQ ID NO: 5517 - RNA, 20 nt, synthetic construct
  source 1..20: mol_type = other RNA
gcggaactgcatgtgagagt

SEQ ID NO: 5518 - RNA, 20 nt, synthetic construct
  source 1..20: mol_type = other RNA
cgcggaactgcatgtgagag

SEQ ID NO: 5519 - RNA, 20 nt, synthetic construct
  source 1..20: mol_type = other RNA
gcgcggaactgcatgtgaga

SEQ ID NO: 5520 - RNA, 20 nt, synthetic construct
  source 1..20: mol_type = other RNA
tcaagtcactaagtcgtaag

SEQ ID NO: 5521 - RNA, 20 nt, synthetic construct
  source 1..20: mol_type = other RNA
catcaagtcactaagtcgta

SEQ ID NO: 5522 - RNA, 20 nt, synthetic construct
  source 1..20: mol_type = other RNA
atcaagtcactaagtcgtaa

SEQ ID NO: 5523 - RNA, 20 nt, synthetic construct
  source 1..20: mol_type = other RNA
ccatcaagtcactaagtcgt

SEQ ID NO: 5524 - RNA, 20 nt, synthetic construct
  source 1..20: mol_type = other RNA
gccatcaagtcactaagtcg

SEQ ID NO: 5525 - RNA, 20 nt, synthetic construct
  source 1..20: mol_type = other RNA
tgccatcaagtcactaagtc

SEQ ID NO: 5526 - RNA, 20 nt, synthetic construct
  source 1..20: mol_type = other RNA
attgactttggggactgctt

SEQ ID NO: 5527 - RNA, 20 nt, synthetic construct
  source 1..20: mol_type = other RNA
ttgactttggggactgcttt

SEQ ID NO: 5528 - RNA, 20 nt, synthetic construct
  source 1..20: mol_type = other RNA
cattgactttggggactgct

SEQ ID NO: 5529 - RNA, 20 nt, synthetic construct
  source 1..20: mol_type = other RNA
acattgactttggggactgc

SEQ ID NO: 5530 - RNA, 20 nt, synthetic construct
  source 1..20: mol_type = other RNA
cacattgactttggggactg

SEQ ID NO: 5531 - RNA, 20 nt, synthetic construct
  source 1..20: mol_type = other RNA
gagataggtgagtaatttaa

SEQ ID NO: 5532 - RNA, 20 nt, synthetic construct
  source 1..20: mol_type = other RNA
ggagataggtgagtaattta

SEQ ID NO: 5533 - RNA, 20 nt, synthetic construct
  source 1..20: mol_type = other RNA
gggagataggtgagtaattt

SEQ ID NO: 5534 - RNA, 20 nt, synthetic construct
  source 1..20: mol_type = other RNA
tgggagataggtgagtaatt

SEQ ID NO: 5535 - RNA, 20 nt, synthetic construct
  source 1..20: mol_type = other RNA
ctgggagataggtgagtaat

SEQ ID NO: 5536 - RNA, 20 nt, synthetic construct
  source 1..20: mol_type = other RNA
catccaacctgatgctggac

SEQ ID NO: 5537 - RNA, 20 nt, synthetic construct
  source 1..20: mol_type = other RNA
ccaacctgatgctggaccgt

SEQ ID NO: 5538 - RNA, 20 nt, synthetic construct
  source 1..20: mol_type = other RNA
tccaacctgatgctggaccg

SEQ ID NO: 5539 - RNA, 20 nt, synthetic construct
  source 1..20: mol_type = other RNA
atccaacctgatgctggacc

SEQ ID NO: 5540 - RNA, 20 nt, synthetic construct
  source 1..20: mol_type = other RNA
ccatccaacctgatgctgga

SEQ ID NO: 5541 - RNA, 20 nt, synthetic construct
  source 1..20: mol_type = other RNA
cccatccaacctgatgctgg

SEQ ID NO: 5542 - RNA, 20 nt, synthetic construct
  source 1..20: mol_type = other RNA
taaaaggccatgaagatctg

SEQ ID NO: 5543 - RNA, 20 nt, synthetic construct
  source 1..20: mol_type = other RNA
tctaaaaggccatgaagatc

SEQ ID NO: 5544 - RNA, 20 nt, synthetic construct
  source 1..20: mol_type = other RNA
aaaaggccatgaagatctgc

SEQ ID NO: 5545 - RNA, 20 nt, synthetic construct
  source 1..20: mol_type = other RNA
ctaaaaggccatgaagatct

SEQ ID NO: 5546 - RNA, 20 nt, synthetic construct
  source 1..20: mol_type = other RNA
ttctaaaaggccatgaagat

SEQ ID NO: 5547 - RNA, 20 nt, synthetic construct
  source 1..20: mol_type = other RNA
cttctaaaaggccatgaaga

SEQ ID NO: 5548 - RNA, 20 nt, synthetic construct
  source 1..20: mol_type = other RNA
ccttctaaaaggccatgaag

SEQ ID NO: 5549 - RNA, 20 nt, synthetic construct
  source 1..20: mol_type = other RNA
ttgccgactttggcctctcc

SEQ ID NO: 5550 - RNA, 20 nt, synthetic construct
  source 1..20: mol_type = other RNA
tgccgactttggcctctcca

SEQ ID NO: 5551 - RNA, 20 nt, synthetic construct
  source 1..20: mol_type = other RNA
attgccgactttggcctctc

SEQ ID NO: 5552 - RNA, 20 nt, synthetic construct
  source 1..20: mol_type = other RNA
gccgactttggcctctccag

SEQ ID NO: 5553 - RNA, 20 nt, synthetic construct
  source 1..20: mol_type = other RNA
ccgactttggcctctccagg

SEQ ID NO: 5554 - RNA, 20 nt, synthetic construct
  source 1..20: mol_type = other RNA
gagatttagccaccaggaac

SEQ ID NO: 5555 - RNA, 20 nt, synthetic construct
  source 1..20: mol_type = other RNA
caccgagatttagccaccag

SEQ ID NO: 5556 - RNA, 20 nt, synthetic construct
  source 1..20: mol_type = other RNA
accgagatttagccaccagg

SEQ ID NO: 5557 - RNA, 20 nt, synthetic construct
  source 1..20: mol_type = other RNA
ccgagatttagccaccagga

SEQ ID NO: 5558 - RNA, 20 nt, synthetic construct
  source 1..20: mol_type = other RNA
cgagatttagccaccaggaa

SEQ ID NO: 5559 - RNA, 20 nt, synthetic construct
  source 1..20: mol_type = other RNA
accaggaactgcctggtggg

SEQ ID NO: 5560 - RNA, 20 nt, synthetic construct
  source 1..20: mol_type = other RNA
caggaactgcctggtgggcg

SEQ ID NO: 5561 - RNA, 20 nt, synthetic construct
  source 1..20: mol_type = other RNA
caccaggaactgcctggtgg

SEQ ID NO: 5562 - RNA, 20 nt, synthetic construct
  source 1..20: mol_type = other RNA
ccaggaactgcctggtgggc

SEQ ID NO: 5563 - RNA, 20 nt, synthetic construct
  source 1..20: mol_type = other RNA
aggaactgcctggtgggcga

SEQ ID NO: 5564 - RNA, 20 nt, synthetic construct
  source 1..20: mol_type = other RNA
ggaactgcctggtgggcgag

SEQ ID NO: 5565 - RNA, 20 nt, synthetic construct
  source 1..20: mol_type = other RNA
gcagtaaagatgctcaaaga

SEQ ID NO: 5566 - RNA, 20 nt, synthetic construct
  source 1..20: mol_type = other RNA
gtaaagatgctcaaagaaga

SEQ ID NO: 5567 - RNA, 20 nt, synthetic construct
  source 1..20: mol_type = other RNA
ggcagtaaagatgctcaaag

SEQ ID NO: 5568 - RNA, 20 nt, synthetic construct
  source 1..20: mol_type = other RNA
cagtaaagatgctcaaagaa

SEQ ID NO: 5569 - RNA, 20 nt, synthetic construct
  source 1..20: mol_type = other RNA
agtaaagatgctcaaagaag

SEQ ID NO: 5570 - RNA, 20 nt, synthetic construct
  source 1..20: mol_type = other RNA
taaagatgctcaaagaagaa

SEQ ID NO: 5571 - RNA, 20 nt, synthetic construct
  source 1..20: mol_type = other RNA
tcgactttggtctggccagg

SEQ ID NO: 5572 - RNA, 20 nt, synthetic construct
  source 1..20: mol_type = other RNA
catcgactttggtctggcca

SEQ ID NO: 5573 - RNA, 20 nt, synthetic construct
  source 1..20: mol_type = other RNA
tcatcgactttggtctggcc

SEQ ID NO: 5574 - RNA, 20 nt, synthetic construct
  source 1..20: mol_type = other RNA
atcgactttggtctggccag

SEQ ID NO: 5575 - RNA, 20 nt, synthetic construct
  source 1..20: mol_type = other RNA
ctcatcgactttggtctggc

SEQ ID NO: 5576 - RNA, 20 nt, synthetic construct
  source 1..20: mol_type = other RNA
tggacctcaagccggagaac

SEQ ID NO: 5577 - RNA, 20 nt, synthetic construct
  source 1..20: mol_type = other RNA
ctggacctcaagccggagaa

SEQ ID NO: 5578 - RNA, 20 nt, synthetic construct
  source 1..20: mol_type = other RNA
cctggacctcaagccggaga

SEQ ID NO: 5579 - RNA, 20 nt, synthetic construct
  source 1..20: mol_type = other RNA
acctggacctcaagccggag

SEQ ID NO: 5580 - RNA, 20 nt, synthetic construct
  source 1..20: mol_type = other RNA
cacctggacctcaagccgga

SEQ ID NO: 5581 - RNA, 20 nt, synthetic construct
  source 1..20: mol_type = other RNA
agaacatcatgtgtgtcaac

SEQ ID NO: 5582 - RNA, 20 nt, synthetic construct
  source 1..20: mol_type = other RNA
gagaacatcatgtgtgtcaa

SEQ ID NO: 5583 - RNA, 20 nt, synthetic construct
  source 1..20: mol_type = other RNA
ggagaacatcatgtgtgtca

SEQ ID NO: 5584 - RNA, 20 nt, synthetic construct
  source 1..20: mol_type = other RNA
cggagaacatcatgtgtgtc

SEQ ID NO: 5585 - RNA, 20 nt, synthetic construct
  source 1..20: mol_type = other RNA
ccggagaacatcatgtgtgt

SEQ ID NO: 5586 - RNA, 20 nt, synthetic construct
  source 1..20: mol_type = other RNA
gccggagaacatcatgtgtg

SEQ ID NO: 5587 - RNA, 20 nt, synthetic construct
  source 1..20: mol_type = other RNA
ggaagttcttcaaggcatat

SEQ ID NO: 5588 - RNA, 20 nt, synthetic construct
  source 1..20: mol_type = other RNA
gggaagttcttcaaggcata

SEQ ID NO: 5589 - RNA, 20 nt, synthetic construct
  source 1..20: mol_type = other RNA
agggaagttcttcaaggcat

SEQ ID NO: 5590 - RNA, 20 nt, synthetic construct
  source 1..20: mol_type = other RNA
cagggaagttcttcaaggca

SEQ ID NO: 5591 - RNA, 20 nt, synthetic construct
  source 1..20: mol_type = other RNA
gcagggaagttcttcaaggc

SEQ ID NO: 5592 - RNA, 20 nt, synthetic construct
  source 1..20: mol_type = other RNA
ggcagggaagttcttcaagg

SEQ ID NO: 5593 - RNA, 20 nt, synthetic construct
  source 1..20: mol_type = other RNA
tcattgactttggcctggca

SEQ ID NO: 5594 - RNA, 20 nt, synthetic construct
  source 1..20: mol_type = other RNA
cattgactttggcctggcac

SEQ ID NO: 5595 - RNA, 20 nt, synthetic construct
  source 1..20: mol_type = other RNA
ttgactttggcctggcacgg

SEQ ID NO: 5596 - RNA, 20 nt, synthetic construct
  source 1..20: mol_type = other RNA
atcattgactttggcctggc

SEQ ID NO: 5597 - RNA, 20 nt, synthetic construct
  source 1..20: mol_type = other RNA
attgactttggcctggcacg

SEQ ID NO: 5598 - RNA, 20 nt, synthetic construct
  source 1..20: mol_type = other RNA
cacctggacctcaaggtacc

SEQ ID NO: 5599 - RNA, 20 nt, synthetic construct
  source 1..20: mol_type = other RNA
tggacctcaaggtaccagac

SEQ ID NO: 5600 - RNA, 20 nt, synthetic construct
  source 1..20: mol_type = other RNA
acctggacctcaaggtacca

SEQ ID NO: 5601 - RNA, 20 nt, synthetic construct
  source 1..20: mol_type = other RNA
cctggacctcaaggtaccag

SEQ ID NO: 5602 - RNA, 20 nt, synthetic construct
  source 1..20: mol_type = other RNA
ctggacctcaaggtaccaga

SEQ ID NO: 5603 - RNA, 20 nt, synthetic construct
  source 1..20: mol_type = other RNA
gccagagaacatcctgtgtg

SEQ ID NO: 5604 - RNA, 20 nt, synthetic construct
  source 1..20: mol_type = other RNA
ccagagaacatcctgtgtgt

SEQ ID NO: 5605 - RNA, 20 nt, synthetic construct
  source 1..20: mol_type = other RNA
cagagaacatcctgtgtgtc

SEQ ID NO: 5606 - RNA, 20 nt, synthetic construct
  source 1..20: mol_type = other RNA
agagaacatcctgtgtgtca

SEQ ID NO: 5607 - RNA, 20 nt, synthetic construct
  source 1..20: mol_type = other RNA
gagaacatcctgtgtgtcaa

SEQ ID NO: 5608 - RNA, 20 nt, synthetic construct
  source 1..20: mol_type = other RNA
agaacatcctgtgtgtcaac

SEQ ID NO: 5609 - RNA, 20 nt, synthetic construct
  source 1..20: mol_type = other RNA
agccaaggtcatcaagaaac

SEQ ID NO: 5610 - RNA, 20 nt, synthetic construct
  source 1..20: mol_type = other RNA
ggcagccaaggtcatcaaga

SEQ ID NO: 5611 - RNA, 20 nt, synthetic construct
  source 1..20: mol_type = other RNA
gcagccaaggtcatcaagaa

SEQ ID NO: 5612 - RNA, 20 nt, synthetic construct
  source 1..20: mol_type = other RNA
cagccaaggtcatcaagaaa

SEQ ID NO: 5613 - RNA, 20 nt, synthetic construct
  source 1..20: mol_type = other RNA
gccaaggtcatcaagaaaca

SEQ ID NO: 5614 - RNA, 20 nt, synthetic construct
  source 1..20: mol_type = other RNA
ccaaggtcatcaagaaacag

SEQ ID NO: 5615 - RNA, 20 nt, synthetic construct
  source 1..20: mol_type = other RNA
ttgactttgggctggccaga

SEQ ID NO: 5616 - RNA, 20 nt, synthetic construct
  source 1..20: mol_type = other RNA
tcattgactttgggctggcc

SEQ ID NO: 5617 - RNA, 20 nt, synthetic construct
  source 1..20: mol_type = other RNA
attgactttgggctggccag

SEQ ID NO: 5618 - RNA, 20 nt, synthetic construct
  source 1..20: mol_type = other RNA
cattgactttgggctggcca

SEQ ID NO: 5619 - RNA, 20 nt, synthetic construct
  source 1..20: mol_type = other RNA
atcattgactttgggctggc

SEQ ID NO: 5620 - RNA, 20 nt, synthetic construct
  source 1..20: mol_type = other RNA
ctggacctcaaggtgggttc

SEQ ID NO: 5621 - RNA, 20 nt, synthetic construct
  source 1..20: mol_type = other RNA
tggacctcaaggtgggttct

SEQ ID NO: 5622 - RNA, 20 nt, synthetic construct
  source 1..20: mol_type = other RNA
cctggacctcaaggtgggtt

SEQ ID NO: 5623 - RNA, 20 nt, synthetic construct
  source 1..20: mol_type = other RNA
acctggacctcaaggtgggt

SEQ ID NO: 5624 - RNA, 20 nt, synthetic construct
  source 1..20: mol_type = other RNA
cacctggacctcaaggtggg

SEQ ID NO: 5625 - RNA, 20 nt, synthetic construct
  source 1..20: mol_type = other RNA
agaacatattgtgcgtcaat

SEQ ID NO: 5626 - RNA, 20 nt, synthetic construct
  source 1..20: mol_type = other RNA
gagaacatattgtgcgtcaa

SEQ ID NO: 5627 - RNA, 20 nt, synthetic construct
  source 1..20: mol_type = other RNA
ggagaacatattgtgcgtca

SEQ ID NO: 5628 - RNA, 20 nt, synthetic construct
  source 1..20: mol_type = other RNA
cggagaacatattgtgcgtc

SEQ ID NO: 5629 - RNA, 20 nt, synthetic construct
  source 1..20: mol_type = other RNA
ccggagaacatattgtgcgt

SEQ ID NO: 5630 - RNA, 20 nt, synthetic construct
  source 1..20: mol_type = other RNA
gccggagaacatattgtgcg

SEQ ID NO: 5631 - RNA, 20 nt, synthetic construct
  source 1..20: mol_type = other RNA
ccaagatcatcaaagtgaag

SEQ ID NO: 5632 - RNA, 20 nt, synthetic construct
  source 1..20: mol_type = other RNA
tgccaagatcatcaaagtga

SEQ ID NO: 5633 - RNA, 20 nt, synthetic construct
  source 1..20: mol_type = other RNA
ggctgccaagatcatcaaag

SEQ ID NO: 5634 - RNA, 20 nt, synthetic construct
  source 1..20: mol_type = other RNA
gccaagatcatcaaagtgaa

SEQ ID NO: 5635 - RNA, 20 nt, synthetic construct
  source 1..20: mol_type = other RNA
ctgccaagatcatcaaagtg

SEQ ID NO: 5636 - RNA, 20 nt, synthetic construct
  source 1..20: mol_type = other RNA
gctgccaagatcatcaaagt

SEQ ID NO: 5637 - RNA, 20 nt, synthetic construct
  source 1..20: mol_type = other RNA
cttggacctgaaggtaaggg

SEQ ID NO: 5638 - RNA, 20 nt, synthetic construct
  source 1..20: mol_type = other RNA
cacttggacctgaaggtaag

SEQ ID NO: 5639 - RNA, 20 nt, synthetic construct
  source 1..20: mol_type = other RNA
tggacctgaaggtaagggtg

SEQ ID NO: 5640 - RNA, 20 nt, synthetic construct
  source 1..20: mol_type = other RNA
ttggacctgaaggtaagggt

SEQ ID NO: 5641 - RNA, 20 nt, synthetic construct
  source 1..20: mol_type = other RNA
acttggacctgaaggtaagg

SEQ ID NO: 5642 - RNA, 20 nt, synthetic construct
  source 1..20: mol_type = other RNA
agaatatcctgtgtgtgaat

SEQ ID NO: 5643 - RNA, 20 nt, synthetic construct
  source 1..20: mol_type = other RNA
gcctgagaatatcctgtgtg

SEQ ID NO: 5644 - RNA, 20 nt, synthetic construct
  source 1..20: mol_type = other RNA
gagaatatcctgtgtgtgaa

SEQ ID NO: 5645 - RNA, 20 nt, synthetic construct
  source 1..20: mol_type = other RNA
tgagaatatcctgtgtgtga

SEQ ID NO: 5646 - RNA, 20 nt, synthetic construct
  source 1..20: mol_type = other RNA
ctgagaatatcctgtgtgtg

SEQ ID NO: 5647 - RNA, 20 nt, synthetic construct
  source 1..20: mol_type = other RNA
cctgagaatatcctgtgtgt

SEQ ID NO: 5648 - RNA, 20 nt, synthetic construct
  source 1..20: mol_type = other RNA
ccaaaatcatcaagaccaga

SEQ ID NO: 5649 - RNA, 20 nt, synthetic construct
  source 1..20: mol_type = other RNA
gccaaaatcatcaagaccag

SEQ ID NO: 5650 - RNA, 20 nt, synthetic construct
  source 1..20: mol_type = other RNA
cagccaaaatcatcaagacc

SEQ ID NO: 5651 - RNA, 20 nt, synthetic construct
  source 1..20: mol_type = other RNA
caaaatcatcaagaccagag

SEQ ID NO: 5652 - RNA, 20 nt, synthetic construct
  source 1..20: mol_type = other RNA
agccaaaatcatcaagacca

SEQ ID NO: 5653 - RNA, 20 nt, synthetic construct
  source 1..20: mol_type = other RNA
gcagccaaaatcatcaagac

SEQ ID NO: 5654 - RNA, 20 nt, synthetic construct
  source 1..20: mol_type = other RNA
ggcagccaaaatcatcaaga

SEQ ID NO: 5655 - RNA, 20 nt, synthetic construct
  source 1..20: mol_type = other RNA
cacagagatgtgaaaggcaa

SEQ ID NO: 5656 - RNA, 20 nt, synthetic construct
  source 1..20: mol_type = other RNA
acagagatgtgaaaggcaat

SEQ ID NO: 5657 - RNA, 20 nt, synthetic construct
  source 1..20: mol_type = other RNA
cagagatgtgaaaggcaata

SEQ ID NO: 5658 - RNA, 20 nt, synthetic construct
  source 1..20: mol_type = other RNA
agagatgtgaaaggcaataa

SEQ ID NO: 5659 - RNA, 20 nt, synthetic construct
  source 1..20: mol_type = other RNA
gagatgtgaaaggcaataac

SEQ ID NO: 5660 - RNA, 20 nt, synthetic construct
  source 1..20: mol_type = other RNA
caataacattctattgacca

SEQ ID NO: 5661 - RNA, 20 nt, synthetic construct
  source 1..20: mol_type = other RNA
aataacattctattgaccac

SEQ ID NO: 5662 - RNA, 20 nt, synthetic construct
  source 1..20: mol_type = other RNA
aggcaataacattctattga

SEQ ID NO: 5663 - RNA, 20 nt, synthetic construct
  source 1..20: mol_type = other RNA
ggcaataacattctattgac

SEQ ID NO: 5664 - RNA, 20 nt, synthetic construct
  source 1..20: mol_type = other RNA
gcaataacattctattgacc

SEQ ID NO: 5665 - RNA, 20 nt, synthetic construct
  source 1..20: mol_type = other RNA
ataacattctattgaccacg

SEQ ID NO: 5666 - RNA, 20 nt, synthetic construct
  source 1..20: mol_type = other RNA
agcagtcaaaattcttgatc

SEQ ID NO: 5667 - RNA, 20 nt, synthetic construct
  source 1..20: mol_type = other RNA
gcagtcaaaattcttgatcc

SEQ ID NO: 5668 - RNA, 20 nt, synthetic construct
  source 1..20: mol_type = other RNA
cagtcaaaattcttgatcca

SEQ ID NO: 5669 - RNA, 20 nt, synthetic construct
  source 1..20: mol_type = other RNA
agtcaaaattcttgatccaa

SEQ ID NO: 5670 - RNA, 20 nt, synthetic construct
  source 1..20: mol_type = other RNA
gtcaaaattcttgatccaat

SEQ ID NO: 5671 - RNA, 20 nt, synthetic construct
  source 1..20: mol_type = other RNA
tcaaaattcttgatccaatt

SEQ ID NO: 5672 - RNA, 20 nt, synthetic construct
  source 1..20: mol_type = other RNA
caaaattcttgatccaattc

SEQ ID NO: 5673 - RNA, 20 nt, synthetic construct
  source 1..20: mol_type = other RNA
tcgttgactttggtaatgac

SEQ ID NO: 5674 - RNA, 20 nt, synthetic construct
  source 1..20: mol_type = other RNA
ctcgttgactttggtaatga

SEQ ID NO: 5675 - RNA, 20 nt, synthetic construct
  source 1..20: mol_type = other RNA
cgttgactttggtaatgact

SEQ ID NO: 5676 - RNA, 20 nt, synthetic construct
  source 1..20: mol_type = other RNA
gttgactttggtaatgactg

SEQ ID NO: 5677 - RNA, 20 nt, synthetic construct
  source 1..20: mol_type = other RNA
ttgactttggtaatgactgc

SEQ ID NO: 5678 - RNA, 20 nt, synthetic construct
  source 1..20: mol_type = other RNA
caccgtgatgtgaaggggaa

SEQ ID NO: 5679 - RNA, 20 nt, synthetic construct
  source 1..20: mol_type = other RNA
accgtgatgtgaaggggaat

SEQ ID NO: 5680 - RNA, 20 nt, synthetic construct
  source 1..20: mol_type = other RNA
ccgtgatgtgaaggggaata

SEQ ID NO: 5681 - RNA, 20 nt, synthetic construct
  source 1..20: mol_type = other RNA
cgtgatgtgaaggggaataa

SEQ ID NO: 5682 - RNA, 20 nt, synthetic construct
  source 1..20: mol_type = other RNA
gtgatgtgaaggggaataac

SEQ ID NO: 5683 - RNA, 20 nt, synthetic construct
  source 1..20: mol_type = other RNA
gaaggggaataacattcttc

SEQ ID NO: 5684 - RNA, 20 nt, synthetic construct
  source 1..20: mol_type = other RNA
aaggggaataacattcttct

SEQ ID NO: 5685 - RNA, 20 nt, synthetic construct
  source 1..20: mol_type = other RNA
aggggaataacattcttctg

SEQ ID NO: 5686 - RNA, 20 nt, synthetic construct
  source 1..20: mol_type = other RNA
ggggaataacattcttctga

SEQ ID NO: 5687 - RNA, 20 nt, synthetic construct
  source 1..20: mol_type = other RNA
gggaataacattcttctgac

SEQ ID NO: 5688 - RNA, 20 nt, synthetic construct
  source 1..20: mol_type = other RNA
ggaataacattcttctgaca

SEQ ID NO: 5689 - RNA, 20 nt, synthetic construct
  source 1..20: mol_type = other RNA
gcagtgaaaattctggatcc

SEQ ID NO: 5690 - RNA, 20 nt, synthetic construct
  source 1..20: mol_type = other RNA
tgaaaattctggatccagtc

SEQ ID NO: 5691 - RNA, 20 nt, synthetic construct
  source 1..20: mol_type = other RNA
tgcagtgaaaattctggatc

SEQ ID NO: 5692 - RNA, 20 nt, synthetic construct
  source 1..20: mol_type = other RNA
cagtgaaaattctggatcca

SEQ ID NO: 5693 - RNA, 20 nt, synthetic construct
  source 1..20: mol_type = other RNA
agtgaaaattctggatccag

SEQ ID NO: 5694 - RNA, 20 nt, synthetic construct
  source 1..20: mol_type = other RNA
gtgaaaattctggatccagt

SEQ ID NO: 5695 - RNA, 20 nt, synthetic construct
  source 1..20: mol_type = other RNA
gaaaattctggatccagtca

SEQ ID NO: 5696 - RNA, 20 nt, synthetic construct
  source 1..20: mol_type = other RNA
gagacattaaatctcaggta

SEQ ID NO: 5697 - RNA, 20 nt, synthetic construct
  source 1..20: mol_type = other RNA
catcgagacattaaatctca

SEQ ID NO: 5698 - RNA, 20 nt, synthetic construct
  source 1..20: mol_type = other RNA
cgagacattaaatctcaggt

SEQ ID NO: 5699 - RNA, 20 nt, synthetic construct
  source 1..20: mol_type = other RNA
tcgagacattaaatctcagg

SEQ ID NO: 5700 - RNA, 20 nt, synthetic construct
  source 1..20: mol_type = other RNA
atcgagacattaaatctcag

SEQ ID NO: 5701 - RNA, 20 nt, synthetic construct
  source 1..20: mol_type = other RNA
tcaaggaaattaacatctca

SEQ ID NO: 5702 - RNA, 20 nt, synthetic construct
  source 1..20: mol_type = other RNA
atcaaggaaattaacatctc

SEQ ID NO: 5703 - RNA, 20 nt, synthetic construct
  source 1..20: mol_type = other RNA
tatcaaggaaattaacatct

SEQ ID NO: 5704 - RNA, 20 nt, synthetic construct
  source 1..20: mol_type = other RNA
ttatcaaggaaattaacatc

SEQ ID NO: 5705 - RNA, 20 nt, synthetic construct
  source 1..20: mol_type = other RNA
gttatcaaggaaattaacat

SEQ ID NO: 5706 - RNA, 20 nt, synthetic construct
  source 1..20: mol_type = other RNA
tgttatcaaggaaattaaca

SEQ ID NO: 5707 - RNA, 20 nt, synthetic construct
  source 1..20: mol_type = other RNA
agctgactttggcctggcaa

SEQ ID NO: 5708 - RNA, 20 nt, synthetic construct
  source 1..20: mol_type = other RNA
ctgactttggcctggcaaag

SEQ ID NO: 5709 - RNA, 20 nt, synthetic construct
  source 1..20: mol_type = other RNA
gctgactttggcctggcaaa

SEQ ID NO: 5710 - RNA, 20 nt, synthetic construct
  source 1..20: mol_type = other RNA
tagctgactttggcctggca

SEQ ID NO: 5711 - RNA, 20 nt, synthetic construct
  source 1..20: mol_type = other RNA
gagatctgacaccaaacaac

SEQ ID NO: 5712 - RNA, 20 nt, synthetic construct
  source 1..20: mol_type = other RNA
agagatctgacaccaaacaa

SEQ ID NO: 5713 - RNA, 20 nt, synthetic construct
  source 1..20: mol_type = other RNA
tagagatctgacaccaaaca

SEQ ID NO: 5714 - RNA, 20 nt, synthetic construct
  source 1..20: mol_type = other RNA
atagagatctgacaccaaac

SEQ ID NO: 5715 - RNA, 20 nt, synthetic construct
  source 1..20: mol_type = other RNA
catagagatctgacaccaaa

SEQ ID NO: 5716 - RNA, 20 nt, synthetic construct
  source 1..20: mol_type = other RNA
ccaaacaacattatgttggg

SEQ ID NO: 5717 - RNA, 20 nt, synthetic construct
  source 1..20: mol_type = other RNA
accaaacaacattatgttgg

SEQ ID NO: 5718 - RNA, 20 nt, synthetic construct
  source 1..20: mol_type = other RNA
caaacaacattatgttgggg

SEQ ID NO: 5719 - RNA, 20 nt, synthetic construct
  source 1..20: mol_type = other RNA
gaaagaggtcaatttacata

SEQ ID NO: 5720 - RNA, 20 nt, synthetic construct
  source 1..20: mol_type = other RNA
tgaaagaggtcaatttacat

SEQ ID NO: 5721 - RNA, 20 nt, synthetic construct
  source 1..20: mol_type = other RNA
atgaaagaggtcaatttaca

SEQ ID NO: 5722 - RNA, 20 nt, synthetic construct
  source 1..20: mol_type = other RNA
aatgaaagaggtcaatttac

SEQ ID NO: 5723 - RNA, 20 nt, synthetic construct
  source 1..20: mol_type = other RNA
caatgaaagaggtcaattta

SEQ ID NO: 5724 - RNA, 20 nt, synthetic construct
  source 1..20: mol_type = other RNA
gcaatgaaagaggtcaattt

SEQ ID NO: 5725 - RNA, 20 nt, synthetic construct
  source 1..20: mol_type = other RNA
agcaatgaaagaggtcaatt

SEQ ID NO: 5726 - RNA, 20 nt, synthetic construct
  source 1..20: mol_type = other RNA
gagacttaaagtcaaagaat

SEQ ID NO: 5727 - RNA, 20 nt, synthetic construct
  source 1..20: mol_type = other RNA
gtcaaagaatgtatttctga

SEQ ID NO: 5728 - RNA, 20 nt, synthetic construct
  source 1..20: mol_type = other RNA
tcaaagaatgtatttctgaa

SEQ ID NO: 5729 - RNA, 20 nt, synthetic construct
  source 1..20: mol_type = other RNA
caaagaatgtatttctgaaa

SEQ ID NO: 5730 - RNA, 20 nt, synthetic construct
  source 1..20: mol_type = other RNA
aaagaatgtatttctgaaaa

SEQ ID NO: 5731 - RNA, 20 nt, synthetic construct
  source 1..20: mol_type = other RNA
gtacttaaggaaatatctgt

SEQ ID NO: 5732 - RNA, 20 nt, synthetic construct
  source 1..20: mol_type = other RNA
tacttaaggaaatatctgtt

SEQ ID NO: 5733 - RNA, 20 nt, synthetic construct
  source 1..20: mol_type = other RNA
cttaaggaaatatctgttgg

SEQ ID NO: 5734 - RNA, 20 nt, synthetic construct
  source 1..20: mol_type = other RNA
ggtacttaaggaaatatctg

SEQ ID NO: 5735 - RNA, 20 nt, synthetic construct
  source 1..20: mol_type = other RNA
acttaaggaaatatctgttg

SEQ ID NO: 5736 - RNA, 20 nt, synthetic construct
  source 1..20: mol_type = other RNA
ttaaggaaatatctgttgga

SEQ ID NO: 5737 - RNA, 20 nt, synthetic construct
  source 1..20: mol_type = other RNA
ttggagactttgggctagct

SEQ ID NO: 5738 - RNA, 20 nt, synthetic construct
  source 1..20: mol_type = other RNA
gagactttgggctagctaga

SEQ ID NO: 5739 - RNA, 20 nt, synthetic construct
  source 1..20: mol_type = other RNA
ggagactttgggctagctag

SEQ ID NO: 5740 - RNA, 20 nt, synthetic construct
  source 1..20: mol_type = other RNA
tggagactttgggctagcta

SEQ ID NO: 5741 - RNA, 20 nt, synthetic construct
  source 1..20: mol_type = other RNA
cttggagactttgggctagc

SEQ ID NO: 5742 - RNA, 20 nt, synthetic construct
  source 1..20: mol_type = other RNA
cgggatctgaaaccagccaa

SEQ ID NO: 5743 - RNA, 20 nt, synthetic construct
  source 1..20: mol_type = other RNA
gggatctgaaaccagccaat

SEQ ID NO: 5744 - RNA, 20 nt, synthetic construct
  source 1..20: mol_type = other RNA
tcgggatctgaaaccagcca

SEQ ID NO: 5745 - RNA, 20 nt, synthetic construct
  source 1..20: mol_type = other RNA
atcgggatctgaaaccagcc

SEQ ID NO: 5746 - RNA, 20 nt, synthetic construct
  source 1..20: mol_type = other RNA
catcgggatctgaaaccagc

SEQ ID NO: 5747 - RNA, 20 nt, synthetic construct
  source 1..20: mol_type = other RNA
tttggaaagaacttgactat

SEQ ID NO: 5748 - RNA, 20 nt, synthetic construct
  source 1..20: mol_type = other RNA
gtttggaaagaacttgacta

SEQ ID NO: 5749 - RNA, 20 nt, synthetic construct
  source 1..20: mol_type = other RNA
gaaagaacttgactatggct

SEQ ID NO: 5750 - RNA, 20 nt, synthetic construct
  source 1..20: mol_type = other RNA
ggaaagaacttgactatggc

SEQ ID NO: 5751 - RNA, 20 nt, synthetic construct
  source 1..20: mol_type = other RNA
tggaaagaacttgactatgg

SEQ ID NO: 5752 - RNA, 20 nt, synthetic construct
  source 1..20: mol_type = other RNA
ttggaaagaacttgactatg

SEQ ID NO: 5753 - RNA, 20 nt, synthetic construct
  source 1..20: mol_type = other RNA
agtttggaaagaacttgact

SEQ ID NO: 5754 - RNA, 20 nt, synthetic construct
  source 1..20: mol_type = other RNA
tgggagactttggatctgcc

SEQ ID NO: 5755 - RNA, 20 nt, synthetic construct
  source 1..20: mol_type = other RNA
gagactttggatctgcccgt

SEQ ID NO: 5756 - RNA, 20 nt, synthetic construct
  source 1..20: mol_type = other RNA
ggagactttggatctgcccg

SEQ ID NO: 5757 - RNA, 20 nt, synthetic construct
  source 1..20: mol_type = other RNA
gggagactttggatctgccc

SEQ ID NO: 5758 - RNA, 20 nt, synthetic construct
  source 1..20: mol_type = other RNA
ttgggagactttggatctgc

SEQ ID NO: 5759 - RNA, 20 nt, synthetic construct
  source 1..20: mol_type = other RNA
gagatatcaagtccaaggtg

SEQ ID NO: 5760 - RNA, 20 nt, synthetic construct
  source 1..20: mol_type = other RNA
cagagatatcaagtccaagg

SEQ ID NO: 5761 - RNA, 20 nt, synthetic construct
  source 1..20: mol_type = other RNA
cacagagatatcaagtccaa

SEQ ID NO: 5762 - RNA, 20 nt, synthetic construct
  source 1..20: mol_type = other RNA
agagatatcaagtccaaggt

SEQ ID NO: 5763 - RNA, 20 nt, synthetic construct
  source 1..20: mol_type = other RNA
acagagatatcaagtccaag

SEQ ID NO: 5764 - RNA, 20 nt, synthetic construct
  source 1..20: mol_type = other RNA
gcagaatatcttcctcactc

SEQ ID NO: 5765 - RNA, 20 nt, synthetic construct
  source 1..20: mol_type = other RNA
agaatatcttcctcactcag

SEQ ID NO: 5766 - RNA, 20 nt, synthetic construct
  source 1..20: mol_type = other RNA
cagaatatcttcctcactca

SEQ ID NO: 5767 - RNA, 20 nt, synthetic construct
  source 1..20: mol_type = other RNA
tgcagaatatcttcctcact

SEQ ID NO: 5768 - RNA, 20 nt, synthetic construct
  source 1..20: mol_type = other RNA
atgcagaatatcttcctcac

SEQ ID NO: 5769 - RNA, 20 nt, synthetic construct
  source 1..20: mol_type = other RNA
aatgcagaatatcttcctca

SEQ ID NO: 5770 - RNA, 20 nt, synthetic construct
  source 1..20: mol_type = other RNA
gaaagaaataaggcttccca

SEQ ID NO: 5771 - RNA, 20 nt, synthetic construct
  source 1..20: mol_type = other RNA
tgaaagaaataaggcttccc

SEQ ID NO: 5772 - RNA, 20 nt, synthetic construct
  source 1..20: mol_type = other RNA
atgaaagaaataaggcttcc

SEQ ID NO: 5773 - RNA, 20 nt, synthetic construct
  source 1..20: mol_type = other RNA
catgaaagaaataaggcttc

SEQ ID NO: 5774 - RNA, 20 nt, synthetic construct
  source 1..20: mol_type = other RNA
ccatgaaagaaataaggctt

SEQ ID NO: 5775 - RNA, 20 nt, synthetic construct
  source 1..20: mol_type = other RNA
gccatgaaagaaataaggct

SEQ ID NO: 5776 - RNA, 20 nt, synthetic construct
  source 1..20: mol_type = other RNA
tgccatgaaagaaataaggc

SEQ ID NO: 5777 - RNA, 20 nt, synthetic construct
  source 1..20: mol_type = other RNA
ggggacctaggaattgcccg

SEQ ID NO: 5778 - RNA, 20 nt, synthetic construct
  source 1..20: mol_type = other RNA
taggggacctaggaattgcc

SEQ ID NO: 5779 - RNA, 20 nt, synthetic construct
  source 1..20: mol_type = other RNA
gggacctaggaattgcccga

SEQ ID NO: 5780 - RNA, 20 nt, synthetic construct
  source 1..20: mol_type = other RNA
aggggacctaggaattgccc

SEQ ID NO: 5781 - RNA, 20 nt, synthetic construct
  source 1..20: mol_type = other RNA
gtaggggacctaggaattgc

SEQ ID NO: 5782 - RNA, 20 nt, synthetic construct
  source 1..20: mol_type = other RNA
cgagatctgaaaactcaaaa

SEQ ID NO: 5783 - RNA, 20 nt, synthetic construct
  source 1..20: mol_type = other RNA
gagatctgaaaactcaaaat

SEQ ID NO: 5784 - RNA, 20 nt, synthetic construct
  source 1..20: mol_type = other RNA
tcgagatctgaaaactcaaa

SEQ ID NO: 5785 - RNA, 20 nt, synthetic construct
  source 1..20: mol_type = other RNA
atcgagatctgaaaactcaa

SEQ ID NO: 5786 - RNA, 20 nt, synthetic construct
  source 1..20: mol_type = other RNA
catcgagatctgaaaactca

SEQ ID NO: 5787 - RNA, 20 nt, synthetic construct
  source 1..20: mol_type = other RNA
ctcaaaatgtcttcctaaca

SEQ ID NO: 5788 - RNA, 20 nt, synthetic construct
  source 1..20: mol_type = other RNA
aaaatgtcttcctaacaaga

SEQ ID NO: 5789 - RNA, 20 nt, synthetic construct
  source 1..20: mol_type = other RNA
caaaatgtcttcctaacaag

SEQ ID NO: 5790 - RNA, 20 nt, synthetic construct
  source 1..20: mol_type = other RNA
tcaaaatgtcttcctaacaa

SEQ ID NO: 5791 - RNA, 20 nt, synthetic construct
  source 1..20: mol_type = other RNA
actcaaaatgtcttcctaac

SEQ ID NO: 5792 - RNA, 20 nt, synthetic construct
  source 1..20: mol_type = other RNA
aactcaaaatgtcttcctaa

SEQ ID NO: 5793 - RNA, 20 nt, synthetic construct
  source 1..20: mol_type = other RNA
ggggactttggtatagcaag

SEQ ID NO: 5794 - RNA, 20 nt, synthetic construct
  source 1..20: mol_type = other RNA
ttggggactttggtatagca

SEQ ID NO: 5795 - RNA, 20 nt, synthetic construct
  source 1..20: mol_type = other RNA
gggactttggtatagcaaga

SEQ ID NO: 5796 - RNA, 20 nt, synthetic construct
  source 1..20: mol_type = other RNA
tggggactttggtatagcaa

SEQ ID NO: 5797 - RNA, 20 nt, synthetic construct
  source 1..20: mol_type = other RNA
cttggggactttggtatagc

SEQ ID NO: 5798 - RNA, 20 nt, synthetic construct
  source 1..20: mol_type = other RNA
cacagggacataaaagctca

SEQ ID NO: 5799 - RNA, 20 nt, synthetic construct
  source 1..20: mol_type = other RNA
gggacataaaagctcaggta

SEQ ID NO: 5800 - RNA, 20 nt, synthetic construct
  source 1..20: mol_type = other RNA
agggacataaaagctcaggt

SEQ ID NO: 5801 - RNA, 20 nt, synthetic construct
  source 1..20: mol_type = other RNA
cagggacataaaagctcagg

SEQ ID NO: 5802 - RNA, 20 nt, synthetic construct
  source 1..20: mol_type = other RNA
acagggacataaaagctcag

SEQ ID NO: 5803 - RNA, 20 nt, synthetic construct
  source 1..20: mol_type = other RNA
gtcataaaagagatcaattt

SEQ ID NO: 5804 - RNA, 20 nt, synthetic construct
  source 1..20: mol_type = other RNA
tgtcataaaagagatcaatt

SEQ ID NO: 5805 - RNA, 20 nt, synthetic construct
  source 1..20: mol_type = other RNA
tcggtgaccttggtctgggc

SEQ ID NO: 5806 - RNA, 20 nt, synthetic construct
  source 1..20: mol_type = other RNA
ctcggtgaccttggtctggg

SEQ ID NO: 5807 - RNA, 20 nt, synthetic construct
  source 1..20: mol_type = other RNA
cggtgaccttggtctgggcc

SEQ ID NO: 5808 - RNA, 20 nt, synthetic construct
  source 1..20: mol_type = other RNA
ggtgaccttggtctgggccg

SEQ ID NO: 5809 - RNA, 20 nt, synthetic construct
  source 1..20: mol_type = other RNA
gtgaccttggtctgggccgc

SEQ ID NO: 5810 - RNA, 20 nt, synthetic construct
  source 1..20: mol_type = other RNA
gcagacatcaagcctgccaa

SEQ ID NO: 5811 - RNA, 20 nt, synthetic construct
  source 1..20: mol_type = other RNA
cctgcagacatcaagcctgc

SEQ ID NO: 5812 - RNA, 20 nt, synthetic construct
  source 1..20: mol_type = other RNA
ctgcagacatcaagcctgcc

SEQ ID NO: 5813 - RNA, 20 nt, synthetic construct
  source 1..20: mol_type = other RNA
tgcagacatcaagcctgcca

SEQ ID NO: 5814 - RNA, 20 nt, synthetic construct
  source 1..20: mol_type = other RNA
cagacatcaagcctgccaac

SEQ ID NO: 5815 - RNA, 20 nt, synthetic construct
  source 1..20: mol_type = other RNA
cctgccaacgtgttcatcac

SEQ ID NO: 5816 - RNA, 20 nt, synthetic construct
  source 1..20: mol_type = other RNA
gcctgccaacgtgttcatca

SEQ ID NO: 5817 - RNA, 20 nt, synthetic construct
  source 1..20: mol_type = other RNA
ctgccaacgtgttcatcaca

SEQ ID NO: 5818 - RNA, 20 nt, synthetic construct
  source 1..20: mol_type = other RNA
tgccaacgtgttcatcacag

SEQ ID NO: 5819 - RNA, 20 nt, synthetic construct
  source 1..20: mol_type = other RNA
gccaacgtgttcatcacagc

SEQ ID NO: 5820 - RNA, 20 nt, synthetic construct
  source 1..20: mol_type = other RNA
ccaacgtgttcatcacagcc

SEQ ID NO: 5821 - RNA, 20 nt, synthetic construct
  source 1..20: mol_type = other RNA
ggctctgaagaaggtgcagg

SEQ ID NO: 5822 - RNA, 20 nt, synthetic construct
  source 1..20: mol_type = other RNA
ctctgaagaaggtgcaggtg

SEQ ID NO: 5823 - RNA, 20 nt, synthetic construct
  source 1..20: mol_type = other RNA
tgaagaaggtgcaggtgagc

SEQ ID NO: 5824 - RNA, 20 nt, synthetic construct
  source 1..20: mol_type = other RNA
gctctgaagaaggtgcaggt

SEQ ID NO: 5825 - RNA, 20 nt, synthetic construct
  source 1..20: mol_type = other RNA
tctgaagaaggtgcaggtga

SEQ ID NO: 5826 - RNA, 20 nt, synthetic construct
  source 1..20: mol_type = other RNA
ctgaagaaggtgcaggtgag

SEQ ID NO: 5827 - RNA, 20 nt, synthetic construct
  source 1..20: mol_type = other RNA
ttggagatcttgggcttggc

SEQ ID NO: 5828 - RNA, 20 nt, synthetic construct
  source 1..20: mol_type = other RNA
tggagatcttgggcttggcc

SEQ ID NO: 5829 - RNA, 20 nt, synthetic construct
  source 1..20: mol_type = other RNA
cttggagatcttgggcttgg

SEQ ID NO: 5830 - RNA, 20 nt, synthetic construct
  source 1..20: mol_type = other RNA
ggagatcttgggcttggccg

SEQ ID NO: 5831 - RNA, 20 nt, synthetic construct
  source 1..20: mol_type = other RNA
gagatcttgggcttggccgg

SEQ ID NO: 5832 - RNA, 20 nt, synthetic construct
  source 1..20: mol_type = other RNA
acagatataaaaccagctaa

SEQ ID NO: 5833 - RNA, 20 nt, synthetic construct
  source 1..20: mol_type = other RNA
ttcacagatataaaaccagc

SEQ ID NO: 5834 - RNA, 20 nt, synthetic construct
  source 1..20: mol_type = other RNA
tcacagatataaaaccagct

SEQ ID NO: 5835 - RNA, 20 nt, synthetic construct
  source 1..20: mol_type = other RNA
cacagatataaaaccagcta

SEQ ID NO: 5836 - RNA, 20 nt, synthetic construct
  source 1..20: mol_type = other RNA
cagatataaaaccagctaat

SEQ ID NO: 5837 - RNA, 20 nt, synthetic construct
  source 1..20: mol_type = other RNA
ccagctaatgtgttcattac

SEQ ID NO: 5838 - RNA, 20 nt, synthetic construct
  source 1..20: mol_type = other RNA
accagctaatgtgttcatta

SEQ ID NO: 5839 - RNA, 20 nt, synthetic construct
  source 1..20: mol_type = other RNA
cagctaatgtgttcattaca

SEQ ID NO: 5840 - RNA, 20 nt, synthetic construct
  source 1..20: mol_type = other RNA
agctaatgtgttcattacag

SEQ ID NO: 5841 - RNA, 20 nt, synthetic construct
  source 1..20: mol_type = other RNA
gctaatgtgttcattacagc

SEQ ID NO: 5842 - RNA, 20 nt, synthetic construct
  source 1..20: mol_type = other RNA
ctaatgtgttcattacagcc

SEQ ID NO: 5843 - RNA, 20 nt, synthetic construct
  source 1..20: mol_type = other RNA
cggtgatttcggcatctcca

SEQ ID NO: 5844 - RNA, 20 nt, synthetic construct
  source 1..20: mol_type = other RNA
atcggtgatttcggcatctc

SEQ ID NO: 5845 - RNA, 20 nt, synthetic construct
  source 1..20: mol_type = other RNA
tcggtgatttcggcatctcc

SEQ ID NO: 5846 - RNA, 20 nt, synthetic construct
  source 1..20: mol_type = other RNA
ggtgatttcggcatctccaa

SEQ ID NO: 5847 - RNA, 20 nt, synthetic construct
  source 1..20: mol_type = other RNA
gtgatttcggcatctccaag

SEQ ID NO: 5848 - RNA, 20 nt, synthetic construct
  source 1..20: mol_type = other RNA
caccgagacctcaagaccca

SEQ ID NO: 5849 - RNA, 20 nt, synthetic construct
  source 1..20: mol_type = other RNA
accgagacctcaagacccag

SEQ ID NO: 5850 - RNA, 20 nt, synthetic construct
  source 1..20: mol_type = other RNA
ccgagacctcaagacccaga

SEQ ID NO: 5851 - RNA, 20 nt, synthetic construct
  source 1..20: mol_type = other RNA
cgagacctcaagacccagaa

SEQ ID NO: 5852 - RNA, 20 nt, synthetic construct
  source 1..20: mol_type = other RNA
gagacctcaagacccagaac

SEQ ID NO: 5853 - RNA, 20 nt, synthetic construct
  source 1..20: mol_type = other RNA
gacccagaacatcctgcttg

SEQ ID NO: 5854 - RNA, 20 nt, synthetic construct
  source 1..20: mol_type = other RNA
acccagaacatcctgcttga

SEQ ID NO: 5855 - RNA, 20 nt, synthetic construct
  source 1..20: mol_type = other RNA
cccagaacatcctgcttgac

SEQ ID NO: 5856 - RNA, 20 nt, synthetic construct
  source 1..20: mol_type = other RNA
ccagaacatcctgcttgaca

SEQ ID NO: 5857 - RNA, 20 nt, synthetic construct
  source 1..20: mol_type = other RNA
cagaacatcctgcttgacaa

SEQ ID NO: 5858 - RNA, 20 nt, synthetic construct
  source 1..20: mol_type = other RNA
agaacatcctgcttgacaaa

SEQ ID NO: 5859 - RNA, 20 nt, synthetic construct
  source 1..20: mol_type = other RNA
gatcatcaagcagattccag

SEQ ID NO: 5860 - RNA, 20 nt, synthetic construct
  source 1..20: mol_type = other RNA
atcatcaagcagattccagt

SEQ ID NO: 5861 - RNA, 20 nt, synthetic construct
  source 1..20: mol_type = other RNA
tcatcaagcagattccagtg

SEQ ID NO: 5862 - RNA, 20 nt, synthetic construct
  source 1..20: mol_type = other RNA
catcaagcagattccagtgg

SEQ ID NO: 5863 - RNA, 20 nt, synthetic construct
  source 1..20: mol_type = other RNA
atcaagcagattccagtgga

SEQ ID NO: 5864 - RNA, 20 nt, synthetic construct
  source 1..20: mol_type = other RNA
tcaagcagattccagtggaa

SEQ ID NO: 5865 - RNA, 20 nt, synthetic construct
  source 1..20: mol_type = other RNA
tggagattatggcctagcaa

SEQ ID NO: 5866 - RNA, 20 nt, synthetic construct
  source 1..20: mol_type = other RNA
gagattatggcctagcaaag

SEQ ID NO: 5867 - RNA, 20 nt, synthetic construct
  source 1..20: mol_type = other RNA
ggagattatggcctagcaaa

SEQ ID NO: 5868 - RNA, 20 nt, synthetic construct
  source 1..20: mol_type = other RNA
ttggagattatggcctagca

SEQ ID NO: 5869 - RNA, 20 nt, synthetic construct
  source 1..20: mol_type = other RNA
cttggagattatggcctagc

SEQ ID NO: 5870 - RNA, 20 nt, synthetic construct
  source 1..20: mol_type = other RNA
gagatataaagacattaaat

SEQ ID NO: 5871 - RNA, 20 nt, synthetic construct
  source 1..20: mol_type = other RNA
agagatataaagacattaaa

SEQ ID NO: 5872 - RNA, 20 nt, synthetic construct
  source 1..20: mol_type = other RNA
cagagatataaagacattaa

SEQ ID NO: 5873 - RNA, 20 nt, synthetic construct
  source 1..20: mol_type = other RNA
tcagagatataaagacatta

SEQ ID NO: 5874 - RNA, 20 nt, synthetic construct
  source 1..20: mol_type = other RNA
ttcagagatataaagacatt

SEQ ID NO: 5875 - RNA, 20 nt, synthetic construct
  source 1..20: mol_type = other RNA
ggaaggaagtcgatttgacc

SEQ ID NO: 5876 - RNA, 20 nt, synthetic construct
  source 1..20: mol_type = other RNA
tgtgtggaaggaagtcgatt

SEQ ID NO: 5877 - RNA, 20 nt, synthetic construct
  source 1..20: mol_type = other RNA
tggaaggaagtcgatttgac

SEQ ID NO: 5878 - RNA, 20 nt, synthetic construct
  source 1..20: mol_type = other RNA
gtggaaggaagtcgatttga

SEQ ID NO: 5879 - RNA, 20 nt, synthetic construct
  source 1..20: mol_type = other RNA
tgtggaaggaagtcgatttg

SEQ ID NO: 5880 - RNA, 20 nt, synthetic construct
  source 1..20: mol_type = other RNA
gtgtggaaggaagtcgattt

SEQ ID NO: 5881 - RNA, 20 nt, synthetic construct
  source 1..20: mol_type = other RNA
agagatctgaaagcagaaaa

SEQ ID NO: 5882 - RNA, 20 nt, synthetic construct
  source 1..20: mol_type = other RNA
catagagatctgaaagcaga

SEQ ID NO: 5883 - RNA, 20 nt, synthetic construct
  source 1..20: mol_type = other RNA
atagagatctgaaagcagaa

SEQ ID NO: 5884 - RNA, 20 nt, synthetic construct
  source 1..20: mol_type = other RNA
tagagatctgaaagcagaaa

SEQ ID NO: 5885 - RNA, 20 nt, synthetic construct
  source 1..20: mol_type = other RNA
gagatctgaaagcagaaaat

SEQ ID NO: 5886 - RNA, 20 nt, synthetic construct
  source 1..20: mol_type = other RNA
cagaaaatgtattctatacc

SEQ ID NO: 5887 - RNA, 20 nt, synthetic construct
  source 1..20: mol_type = other RNA
agcagaaaatgtattctata

SEQ ID NO: 5888 - RNA, 20 nt, synthetic construct
  source 1..20: mol_type = other RNA
gcagaaaatgtattctatac

SEQ ID NO: 5889 - RNA, 20 nt, synthetic construct
  source 1..20: mol_type = other RNA
agaaaatgtattctatacca

SEQ ID NO: 5890 - RNA, 20 nt, synthetic construct
  source 1..20: mol_type = other RNA
gaaaatgtattctataccag

SEQ ID NO: 5891 - RNA, 20 nt, synthetic construct
  source 1..20: mol_type = other RNA
aaaatgtattctataccagt

SEQ ID NO: 5892 - RNA, 20 nt, synthetic construct
  source 1..20: mol_type = other RNA
ggccattaagatcctggaca

SEQ ID NO: 5893 - RNA, 20 nt, synthetic construct
  source 1..20: mol_type = other RNA
gccattaagatcctggacaa

SEQ ID NO: 5894 - RNA, 20 nt, synthetic construct
  source 1..20: mol_type = other RNA
ccattaagatcctggacaag

SEQ ID NO: 5895 - RNA, 20 nt, synthetic construct
  source 1..20: mol_type = other RNA
cattaagatcctggacaaga

SEQ ID NO: 5896 - RNA, 20 nt, synthetic construct
  source 1..20: mol_type = other RNA
attaagatcctggacaagac

SEQ ID NO: 5897 - RNA, 20 nt, synthetic construct
  source 1..20: mol_type = other RNA
ttaagatcctggacaagacc

SEQ ID NO: 5898 - RNA, 20 nt, synthetic construct
  source 1..20: mol_type = other RNA
catcgagacattaagccagg

SEQ ID NO: 5899 - RNA, 20 nt, synthetic construct
  source 1..20: mol_type = other RNA
atcgagacattaagccaggg

SEQ ID NO: 5900 - RNA, 20 nt, synthetic construct
  source 1..20: mol_type = other RNA
tcgagacattaagccaggga

SEQ ID NO: 5901 - RNA, 20 nt, synthetic construct
  source 1..20: mol_type = other RNA
cgagacattaagccagggaa

SEQ ID NO: 5902 - RNA, 20 nt, synthetic construct
  source 1..20: mol_type = other RNA
gagacattaagccagggaat

SEQ ID NO: 5903 - RNA, 20 nt, synthetic construct
  source 1..20: mol_type = other RNA
cagggaatctccttgtgaac

SEQ ID NO: 5904 - RNA, 20 nt, synthetic construct
  source 1..20: mol_type = other RNA
gccagggaatctccttgtga

SEQ ID NO: 5905 - RNA, 20 nt, synthetic construct
  source 1..20: mol_type = other RNA
ccagggaatctccttgtgaa

SEQ ID NO: 5906 - RNA, 20 nt, synthetic construct
  source 1..20: mol_type = other RNA
agggaatctccttgtgaaca

SEQ ID NO: 5907 - RNA, 20 nt, synthetic construct
  source 1..20: mol_type = other RNA
gggaatctccttgtgaacag

SEQ ID NO: 5908 - RNA, 20 nt, synthetic construct
  source 1..20: mol_type = other RNA
ggaatctccttgtgaacagc

SEQ ID NO: 5909 - RNA, 20 nt, synthetic construct
  source 1..20: mol_type = other RNA
tcaccgactatgggctggag

SEQ ID NO: 5910 - RNA, 20 nt, synthetic construct
  source 1..20: mol_type = other RNA
atcaccgactatgggctgga

SEQ ID NO: 5911 - RNA, 20 nt, synthetic construct
  source 1..20: mol_type = other RNA
caccgactatgggctggaga

SEQ ID NO: 5912 - RNA, 20 nt, synthetic construct
  source 1..20: mol_type = other RNA
accgactatgggctggagag

SEQ ID NO: 5913 - RNA, 20 nt, synthetic construct
  source 1..20: mol_type = other RNA
ccgactatgggctggagagc

SEQ ID NO: 5914 - RNA, 20 nt, synthetic construct
  source 1..20: mol_type = other RNA
tcatccaactgcgtggtaga

SEQ ID NO: 5915 - RNA, 20 nt, synthetic construct
  source 1..20: mol_type = other RNA
catccaactgcgtggtagat

SEQ ID NO: 5916 - RNA, 20 nt, synthetic construct
  source 1..20: mol_type = other RNA
atccaactgcgtggtagatg

SEQ ID NO: 5917 - RNA, 20 nt, synthetic construct
  source 1..20: mol_type = other RNA
ccaactgcgtggtagatggg

SEQ ID NO: 5918 - RNA, 20 nt, synthetic construct
  source 1..20: mol_type = other RNA
gtcatccaactgcgtggtag

SEQ ID NO: 5919 - RNA, 20 nt, synthetic construct
  source 1..20: mol_type = other RNA
tccaactgcgtggtagatgg

SEQ ID NO: 5920 - RNA, 20 nt, synthetic construct
  source 1..20: mol_type = other RNA
tgaaacgtgtgaaccgtaaa

SEQ ID NO: 5921 - RNA, 20 nt, synthetic construct
  source 1..20: mol_type = other RNA
ggctgtgaaacgtgtgaacc

SEQ ID NO: 5922 - RNA, 20 nt, synthetic construct
  source 1..20: mol_type = other RNA
gctgtgaaacgtgtgaaccg

SEQ ID NO: 5923 - RNA, 20 nt, synthetic construct
  source 1..20: mol_type = other RNA
ctgtgaaacgtgtgaaccgt

SEQ ID NO: 5924 - RNA, 20 nt, synthetic construct
  source 1..20: mol_type = other RNA
tgtgaaacgtgtgaaccgta

SEQ ID NO: 5925 - RNA, 20 nt, synthetic construct
  source 1..20: mol_type = other RNA
gtgaaacgtgtgaaccgtaa

SEQ ID NO: 5926 - RNA, 20 nt, synthetic construct
  source 1..20: mol_type = other RNA
gaaacgtgtgaaccgtaaac

SEQ ID NO: 5927 - RNA, 20 nt, synthetic construct
  source 1..20: mol_type = other RNA
tcacagactatggcctggcc

SEQ ID NO: 5928 - RNA, 20 nt, synthetic construct
  source 1..20: mol_type = other RNA
atcacagactatggcctggc

SEQ ID NO: 5929 - RNA, 20 nt, synthetic construct
  source 1..20: mol_type = other RNA
cacagactatggcctggcca

SEQ ID NO: 5930 - RNA, 20 nt, synthetic construct
  source 1..20: mol_type = other RNA
acagactatggcctggccag

SEQ ID NO: 5931 - RNA, 20 nt, synthetic construct
  source 1..20: mol_type = other RNA
cagactatggcctggccagc

SEQ ID NO: 5932 - RNA, 20 nt, synthetic construct
  source 1..20: mol_type = other RNA
cctccaactgtgtggtggat

SEQ ID NO: 5933 - RNA, 20 nt, synthetic construct
  source 1..20: mol_type = other RNA
ccaactgtgtggtggatagt

SEQ ID NO: 5934 - RNA, 20 nt, synthetic construct
  source 1..20: mol_type = other RNA
gtcctccaactgtgtggtgg

SEQ ID NO: 5935 - RNA, 20 nt, synthetic construct
  source 1..20: mol_type = other RNA
tcctccaactgtgtggtgga

SEQ ID NO: 5936 - RNA, 20 nt, synthetic construct
  source 1..20: mol_type = other RNA
ctccaactgtgtggtggata

SEQ ID NO: 5937 - RNA, 20 nt, synthetic construct
  source 1..20: mol_type = other RNA
tccaactgtgtggtggatag

SEQ ID NO: 5938 - RNA, 20 nt, synthetic construct
  source 1..20: mol_type = other RNA
cgccatcaaacatgtgaata

SEQ ID NO: 5939 - RNA, 20 nt, synthetic construct
  source 1..20: mol_type = other RNA
catcaaacatgtgaataaga

SEQ ID NO: 5940 - RNA, 20 nt, synthetic construct
  source 1..20: mol_type = other RNA
tcaaacatgtgaataagaag

SEQ ID NO: 5941 - RNA, 20 nt, synthetic construct
  source 1..20: mol_type = other RNA
gccatcaaacatgtgaataa

SEQ ID NO: 5942 - RNA, 20 nt, synthetic construct
  source 1..20: mol_type = other RNA
ccatcaaacatgtgaataag

SEQ ID NO: 5943 - RNA, 20 nt, synthetic construct
  source 1..20: mol_type = other RNA
atcaaacatgtgaataagaa

SEQ ID NO: 5944 - RNA, 20 nt, synthetic construct
  source 1..20: mol_type = other RNA
caaacatgtgaataagaagc

SEQ ID NO: 5945 - RNA, 20 nt, synthetic construct
  source 1..20: mol_type = other RNA
cgggacatcaaaggtcagaa

SEQ ID NO: 5946 - RNA, 20 nt, synthetic construct
  source 1..20: mol_type = other RNA
caccgggacatcaaaggtca

SEQ ID NO: 5947 - RNA, 20 nt, synthetic construct
  source 1..20: mol_type = other RNA
accgggacatcaaaggtcag

SEQ ID NO: 5948 - RNA, 20 nt, synthetic construct
  source 1..20: mol_type = other RNA
ccgggacatcaaaggtcaga

SEQ ID NO: 5949 - RNA, 20 nt, synthetic construct
  source 1..20: mol_type = other RNA
gggacatcaaaggtcagaat

SEQ ID NO: 5950 - RNA, 20 nt, synthetic construct
  source 1..20: mol_type = other RNA
aggtcagaatgtgctgctga

SEQ ID NO: 5951 - RNA, 20 nt, synthetic construct
  source 1..20: mol_type = other RNA
ggtcagaatgtgctgctgac

SEQ ID NO: 5952 - RNA, 20 nt, synthetic construct
  source 1..20: mol_type = other RNA
gtcagaatgtgctgctgact

SEQ ID NO: 5953 - RNA, 20 nt, synthetic construct
  source 1..20: mol_type = other RNA
tcagaatgtgctgctgactc

SEQ ID NO: 5954 - RNA, 20 nt, synthetic construct
  source 1..20: mol_type = other RNA
cagaatgtgctgctgactca

SEQ ID NO: 5955 - RNA, 20 nt, synthetic construct
  source 1..20: mol_type = other RNA
agaatgtgctgctgactcat

SEQ ID NO: 5956 - RNA, 20 nt, synthetic construct
  source 1..20: mol_type = other RNA
ctgttaaagtgatgaacgct

SEQ ID NO: 5957 - RNA, 20 nt, synthetic construct
  source 1..20: mol_type = other RNA
taaagtgatgaacgctcgta

SEQ ID NO: 5958 - RNA, 20 nt, synthetic construct
  source 1..20: mol_type = other RNA
agctgttaaagtgatgaacg

SEQ ID NO: 5959 - RNA, 20 nt, synthetic construct
  source 1..20: mol_type = other RNA
gctgttaaagtgatgaacgc

SEQ ID NO: 5960 - RNA, 20 nt, synthetic construct
  source 1..20: mol_type = other RNA
tgttaaagtgatgaacgctc

SEQ ID NO: 5961 - RNA, 20 nt, synthetic construct
  source 1..20: mol_type = other RNA
gttaaagtgatgaacgctcg

SEQ ID NO: 5962 - RNA, 20 nt, synthetic construct
  source 1..20: mol_type = other RNA
ttaaagtgatgaacgctcgt

SEQ ID NO: 5963 - RNA, 20 nt, synthetic construct
  source 1..20: mol_type = other RNA
gggacctggccacacgcaac

SEQ ID NO: 5964 - RNA, 20 nt, synthetic construct
  source 1..20: mol_type = other RNA
caccgggacctggccacacg

SEQ ID NO: 5965 - RNA, 20 nt, synthetic construct
  source 1..20: mol_type = other RNA
accgggacctggccacacgc

SEQ ID NO: 5966 - RNA, 20 nt, synthetic construct
  source 1..20: mol_type = other RNA
ccgggacctggccacacgca

SEQ ID NO: 5967 - RNA, 20 nt, synthetic construct
  source 1..20: mol_type = other RNA
cgggacctggccacacgcaa

SEQ ID NO: 5968 - RNA, 20 nt, synthetic construct
  source 1..20: mol_type = other RNA
acgcaactgtctagtgggcc

SEQ ID NO: 5969 - RNA, 20 nt, synthetic construct
  source 1..20: mol_type = other RNA
cgcaactgtctagtgggcca

SEQ ID NO: 5970 - RNA, 20 nt, synthetic construct
  source 1..20: mol_type = other RNA
gcaactgtctagtgggccag

SEQ ID NO: 5971 - RNA, 20 nt, synthetic construct
  source 1..20: mol_type = other RNA
cacacgcaactgtctagtgg

SEQ ID NO: 5972 - RNA, 20 nt, synthetic construct
  source 1..20: mol_type = other RNA
acacgcaactgtctagtggg

SEQ ID NO: 5973 - RNA, 20 nt, synthetic construct
  source 1..20: mol_type = other RNA
cacgcaactgtctagtgggc

SEQ ID NO: 5974 - RNA, 20 nt, synthetic construct
  source 1..20: mol_type = other RNA
gtcaaggtgagaccctgccc

SEQ ID NO: 5975 - RNA, 20 nt, synthetic construct
  source 1..20: mol_type = other RNA
tcaaggtgagaccctgcccc

SEQ ID NO: 5976 - RNA, 20 nt, synthetic construct
  source 1..20: mol_type = other RNA
ggctgtcaaggtgagaccct

SEQ ID NO: 5977 - RNA, 20 nt, synthetic construct
  source 1..20: mol_type = other RNA
gctgtcaaggtgagaccctg

SEQ ID NO: 5978 - RNA, 20 nt, synthetic construct
  source 1..20: mol_type = other RNA
ctgtcaaggtgagaccctgc

SEQ ID NO: 5979 - RNA, 20 nt, synthetic construct
  source 1..20: mol_type = other RNA
tgtcaaggtgagaccctgcc

SEQ ID NO: 5980 - RNA, 20 nt, synthetic construct
  source 1..20: mol_type = other RNA
tcggggactttgggatgtcc

SEQ ID NO: 5981 - RNA, 20 nt, synthetic construct
  source 1..20: mol_type = other RNA
cggggactttgggatgtccc

SEQ ID NO: 5982 - RNA, 20 nt, synthetic construct
  source 1..20: mol_type = other RNA
ggggactttgggatgtcccg

SEQ ID NO: 5983 - RNA, 20 nt, synthetic construct
  source 1..20: mol_type = other RNA
atcggggactttgggatgtc

SEQ ID NO: 5984 - RNA, 20 nt, synthetic construct
  source 1..20: mol_type = other RNA
gggactttgggatgtcccgg

SEQ ID NO: 5985 - RNA, 20 nt, synthetic construct
  source 1..20: mol_type = other RNA
gcgatttggccaccaggaac

SEQ ID NO: 5986 - RNA, 20 nt, synthetic construct
  source 1..20: mol_type = other RNA
caccgcgatttggccaccag

SEQ ID NO: 5987 - RNA, 20 nt, synthetic construct
  source 1..20: mol_type = other RNA
accgcgatttggccaccagg

SEQ ID NO: 5988 - RNA, 20 nt, synthetic construct
  source 1..20: mol_type = other RNA
ccgcgatttggccaccagga

SEQ ID NO: 5989 - RNA, 20 nt, synthetic construct
  source 1..20: mol_type = other RNA
cgcgatttggccaccaggaa

SEQ ID NO: 5990 - RNA, 20 nt, synthetic construct
  source 1..20: mol_type = other RNA
caccaggaactgcctggtcg

SEQ ID NO: 5991 - RNA, 20 nt, synthetic construct
  source 1..20: mol_type = other RNA
accaggaactgcctggtcgg

SEQ ID NO: 5992 - RNA, 20 nt, synthetic construct
  source 1..20: mol_type = other RNA
caggaactgcctggtcgggg

SEQ ID NO: 5993 - RNA, 20 nt, synthetic construct
  source 1..20: mol_type = other RNA
ccaggaactgcctggtcggg

SEQ ID NO: 5994 - RNA, 20 nt, synthetic construct
  source 1..20: mol_type = other RNA
aggaactgcctggtcgggga

SEQ ID NO: 5995 - RNA, 20 nt, synthetic construct
  source 1..20: mol_type = other RNA
ggaactgcctggtcggggag

SEQ ID NO: 5996 - RNA, 20 nt, synthetic construct
  source 1..20: mol_type = other RNA
tgaaggtaagagaacattcc

SEQ ID NO: 5997 - RNA, 20 nt, synthetic construct
  source 1..20: mol_type = other RNA
ggcagtgaaggtaagagaac

SEQ ID NO: 5998 - RNA, 20 nt, synthetic construct
  source 1..20: mol_type = other RNA
gcagtgaaggtaagagaaca

SEQ ID NO: 5999 - RNA, 20 nt, synthetic construct
  source 1..20: mol_type = other RNA
cagtgaaggtaagagaacat

SEQ ID NO: 6000 - RNA, 20 nt, synthetic construct
  source 1..20: mol_type = other RNA
agtgaaggtaagagaacatt

SEQ ID NO: 6001 - RNA, 20 nt, synthetic construct
  source 1..20: mol_type = other RNA
gtgaaggtaagagaacattc

SEQ ID NO: 6002 - RNA, 20 nt, synthetic construct
  source 1..20: mol_type = other RNA
ggggacttcggcatgtccag

SEQ ID NO: 6003 - RNA, 20 nt, synthetic construct
  source 1..20: mol_type = other RNA
ttggggacttcggcatgtcc

SEQ ID NO: 6004 - RNA, 20 nt, synthetic construct
  source 1..20: mol_type = other RNA
gggacttcggcatgtccaga

SEQ ID NO: 6005 - RNA, 20 nt, synthetic construct
  source 1..20: mol_type = other RNA
tggggacttcggcatgtcca

SEQ ID NO: 6006 - RNA, 20 nt, synthetic construct
  source 1..20: mol_type = other RNA
attggggacttcggcatgtc

SEQ ID NO: 6007 - RNA, 20 nt, synthetic construct
  source 1..20: mol_type = other RNA
gagacctggccaccaggaac

SEQ ID NO: 6008 - RNA, 20 nt, synthetic construct
  source 1..20: mol_type = other RNA
cgagacctggccaccaggaa

SEQ ID NO: 6009 - RNA, 20 nt, synthetic construct
  source 1..20: mol_type = other RNA
ccgagacctggccaccagga

SEQ ID NO: 6010 - RNA, 20 nt, synthetic construct
  source 1..20: mol_type = other RNA
accgagacctggccaccagg

SEQ ID NO: 6011 - RNA, 20 nt, synthetic construct
  source 1..20: mol_type = other RNA
caccgagacctggccaccag

SEQ ID NO: 6012 - RNA, 20 nt, synthetic construct
  source 1..20: mol_type = other RNA
caggaactgcctggttggag

SEQ ID NO: 6013 - RNA, 20 nt, synthetic construct
  source 1..20: mol_type = other RNA
accaggaactgcctggttgg

SEQ ID NO: 6014 - RNA, 20 nt, synthetic construct
  source 1..20: mol_type = other RNA
ggaactgcctggttggagcg

SEQ ID NO: 6015 - RNA, 20 nt, synthetic construct
  source 1..20: mol_type = other RNA
aggaactgcctggttggagc

SEQ ID NO: 6016 - RNA, 20 nt, synthetic construct
  source 1..20: mol_type = other RNA
ccaggaactgcctggttgga

SEQ ID NO: 6017 - RNA, 20 nt, synthetic construct
  source 1..20: mol_type = other RNA
caccaggaactgcctggttg

SEQ ID NO: 6018 - RNA, 20 nt, synthetic construct
  source 1..20: mol_type = other RNA
ctgtgaaggtaaaccccaga

SEQ ID NO: 6019 - RNA, 20 nt, synthetic construct
  source 1..20: mol_type = other RNA
gctgtgaaggtaaaccccag

SEQ ID NO: 6020 - RNA, 20 nt, synthetic construct
  source 1..20: mol_type = other RNA
tgaaggtaaaccccagaggc

SEQ ID NO: 6021 - RNA, 20 nt, synthetic construct
  source 1..20: mol_type = other RNA
gtgaaggtaaaccccagagg

SEQ ID NO: 6022 - RNA, 20 nt, synthetic construct
  source 1..20: mol_type = other RNA
tgtgaaggtaaaccccagag

SEQ ID NO: 6023 - RNA, 20 nt, synthetic construct
  source 1..20: mol_type = other RNA
ggctgtgaaggtaaacccca

SEQ ID NO: 6024 - RNA, 20 nt, synthetic construct
  source 1..20: mol_type = other RNA
ctgactttgggctttccaac

SEQ ID NO: 6025 - RNA, 20 nt, synthetic construct
  source 1..20: mol_type = other RNA
gctgactttgggctttccaa

SEQ ID NO: 6026 - RNA, 20 nt, synthetic construct
  source 1..20: mol_type = other RNA
tgctgactttgggctttcca

SEQ ID NO: 6027 - RNA, 20 nt, synthetic construct
  source 1..20: mol_type = other RNA
ttgctgactttgggctttcc

SEQ ID NO: 6028 - RNA, 20 nt, synthetic construct
  source 1..20: mol_type = other RNA
attgctgactttgggctttc

SEQ ID NO: 6029 - RNA, 20 nt, synthetic construct
  source 1..20: mol_type = other RNA
gggacttgaagctggaaaat

SEQ ID NO: 6030 - RNA, 20 nt, synthetic construct
  source 1..20: mol_type = other RNA
cgggacttgaagctggaaaa

SEQ ID NO: 6031 - RNA, 20 nt, synthetic construct
  source 1..20: mol_type = other RNA
ccgggacttgaagctggaaa

SEQ ID NO: 6032 - RNA, 20 nt, synthetic construct
  source 1..20: mol_type = other RNA
accgggacttgaagctggaa

SEQ ID NO: 6033 - RNA, 20 nt, synthetic construct
  source 1..20: mol_type = other RNA
caccgggacttgaagctgga

SEQ ID NO: 6034 - RNA, 20 nt, synthetic construct
  source 1..20: mol_type = other RNA
ctggaaaatatactgctcga

SEQ ID NO: 6035 - RNA, 20 nt, synthetic construct
  source 1..20: mol_type = other RNA
aaaatatactgctcgatgac

SEQ ID NO: 6036 - RNA, 20 nt, synthetic construct
  source 1..20: mol_type = other RNA
gaaaatatactgctcgatga

SEQ ID NO: 6037 - RNA, 20 nt, synthetic construct
  source 1..20: mol_type = other RNA
ggaaaatatactgctcgatg

SEQ ID NO: 6038 - RNA, 20 nt, synthetic construct
  source 1..20: mol_type = other RNA
tggaaaatatactgctcgat

SEQ ID NO: 6039 - RNA, 20 nt, synthetic construct
  source 1..20: mol_type = other RNA
gctggaaaatatactgctcg

SEQ ID NO: 6040 - RNA, 20 nt, synthetic construct
  source 1..20: mol_type = other RNA
gctataaaatccattcgtaa

SEQ ID NO: 6041 - RNA, 20 nt, synthetic construct
  source 1..20: mol_type = other RNA
tgctataaaatccattcgta

SEQ ID NO: 6042 - RNA, 20 nt, synthetic construct
  source 1..20: mol_type = other RNA
aaaatccattcgtaaggaca

SEQ ID NO: 6043 - RNA, 20 nt, synthetic construct
  source 1..20: mol_type = other RNA
taaaatccattcgtaaggac

SEQ ID NO: 6044 - RNA, 20 nt, synthetic construct
  source 1..20: mol_type = other RNA
ataaaatccattcgtaagga

SEQ ID NO: 6045 - RNA, 20 nt, synthetic construct
  source 1..20: mol_type = other RNA
tataaaatccattcgtaagg

SEQ ID NO: 6046 - RNA, 20 nt, synthetic construct
  source 1..20: mol_type = other RNA
ctataaaatccattcgtaag

SEQ ID NO: 6047 - RNA, 20 nt, synthetic construct
  source 1..20: mol_type = other RNA
ctgacttcggtctctccaac

SEQ ID NO: 6048 - RNA, 20 nt, synthetic construct
  source 1..20: mol_type = other RNA
gctgacttcggtctctccaa

SEQ ID NO: 6049 - RNA, 20 nt, synthetic construct
  source 1..20: mol_type = other RNA
tgctgacttcggtctctcca

SEQ ID NO: 6050 - RNA, 20 nt, synthetic construct
  source 1..20: mol_type = other RNA
ttgctgacttcggtctctcc

SEQ ID NO: 6051 - RNA, 20 nt, synthetic construct
  source 1..20: mol_type = other RNA
attgctgacttcggtctctc

SEQ ID NO: 6052 - RNA, 20 nt, synthetic construct
  source 1..20: mol_type = other RNA
gagatctcaagctggagaac

SEQ ID NO: 6053 - RNA, 20 nt, synthetic construct
  source 1..20: mol_type = other RNA
cgagatctcaagctggagaa

SEQ ID NO: 6054 - RNA, 20 nt, synthetic construct
  source 1..20: mol_type = other RNA
ccgagatctcaagctggaga

SEQ ID NO: 6055 - RNA, 20 nt, synthetic construct
  source 1..20: mol_type = other RNA
accgagatctcaagctggag

SEQ ID NO: 6056 - RNA, 20 nt, synthetic construct
  source 1..20: mol_type = other RNA
caccgagatctcaagctgga

SEQ ID NO: 6057 - RNA, 20 nt, synthetic construct
  source 1..20: mol_type = other RNA
ctggagaacatcctcttgga

SEQ ID NO: 6058 - RNA, 20 nt, synthetic construct
  source 1..20: mol_type = other RNA
agaacatcctcttggatgcc

SEQ ID NO: 6059 - RNA, 20 nt, synthetic construct
  source 1..20: mol_type = other RNA
gagaacatcctcttggatgc

SEQ ID NO: 6060 - RNA, 20 nt, synthetic construct
  source 1..20: mol_type = other RNA
ggagaacatcctcttggatg

SEQ ID NO: 6061 - RNA, 20 nt, synthetic construct
  source 1..20: mol_type = other RNA
tggagaacatcctcttggat

SEQ ID NO: 6062 - RNA, 20 nt, synthetic construct
  source 1..20: mol_type = other RNA
gctggagaacatcctcttgg

SEQ ID NO: 6063 - RNA, 20 nt, synthetic construct
  source 1..20: mol_type = other RNA
gccatcaagtcaatccggaa

SEQ ID NO: 6064 - RNA, 20 nt, synthetic construct
  source 1..20: mol_type = other RNA
ggccatcaagtcaatccgga

SEQ ID NO: 6065 - RNA, 20 nt, synthetic construct
  source 1..20: mol_type = other RNA
tcaagtcaatccggaaggac

SEQ ID NO: 6066 - RNA, 20 nt, synthetic construct
  source 1..20: mol_type = other RNA
atcaagtcaatccggaagga

SEQ ID NO: 6067 - RNA, 20 nt, synthetic construct
  source 1..20: mol_type = other RNA
catcaagtcaatccggaagg

SEQ ID NO: 6068 - RNA, 20 nt, synthetic construct
  source 1..20: mol_type = other RNA
ccatcaagtcaatccggaag

SEQ ID NO: 6069 - RNA, 20 nt, synthetic construct
  source 1..20: mol_type = other RNA
ctgcgactttggctttgccc

SEQ ID NO: 6070 - RNA, 20 nt, synthetic construct
  source 1..20: mol_type = other RNA
atctgcgactttggctttgc

SEQ ID NO: 6071 - RNA, 20 nt, synthetic construct
  source 1..20: mol_type = other RNA
tctgcgactttggctttgcc

SEQ ID NO: 6072 - RNA, 20 nt, synthetic construct
  source 1..20: mol_type = other RNA
tgcgactttggctttgccca

SEQ ID NO: 6073 - RNA, 20 nt, synthetic construct
  source 1..20: mol_type = other RNA
gcgactttggctttgcccag

SEQ ID NO: 6074 - RNA, 20 nt, synthetic construct
  source 1..20: mol_type = other RNA
cgtggacctgggcaatgcac

SEQ ID NO: 6075 - RNA, 20 nt, synthetic construct
  source 1..20: mol_type = other RNA
tggacctgggcaatgcacag

SEQ ID NO: 6076 - RNA, 20 nt, synthetic construct
  source 1..20: mol_type = other RNA
gtcgtggacctgggcaatgc

SEQ ID NO: 6077 - RNA, 20 nt, synthetic construct
  source 1..20: mol_type = other RNA
tcgtggacctgggcaatgca

SEQ ID NO: 6078 - RNA, 20 nt, synthetic construct
  source 1..20: mol_type = other RNA
gtggacctgggcaatgcaca

SEQ ID NO: 6079 - RNA, 20 nt, synthetic construct
  source 1..20: mol_type = other RNA
cctggacataaaggttcgca

SEQ ID NO: 6080 - RNA, 20 nt, synthetic construct
  source 1..20: mol_type = other RNA
cacctggacataaaggttcg

SEQ ID NO: 6081 - RNA, 20 nt, synthetic construct
  source 1..20: mol_type = other RNA
acctggacataaaggttcgc

SEQ ID NO: 6082 - RNA, 20 nt, synthetic construct
  source 1..20: mol_type = other RNA
ctggacataaaggttcgcat

SEQ ID NO: 6083 - RNA, 20 nt, synthetic construct
  source 1..20: mol_type = other RNA
tggacataaaggttcgcatg

SEQ ID NO: 6084 - RNA, 20 nt, synthetic construct
  source 1..20: mol_type = other RNA
cacctggacctgaggtccga

SEQ ID NO: 6085 - RNA, 20 nt, synthetic construct
  source 1..20: mol_type = other RNA
acctggacctgaggtccgag

SEQ ID NO: 6086 - RNA, 20 nt, synthetic construct
  source 1..20: mol_type = other RNA
cctggacctgaggtccgaga

SEQ ID NO: 6087 - RNA, 20 nt, synthetic construct
  source 1..20: mol_type = other RNA
ctggacctgaggtccgagaa

SEQ ID NO: 6088 - RNA, 20 nt, synthetic construct
  source 1..20: mol_type = other RNA
tggacctgaggtccgagaac

SEQ ID NO: 6089 - RNA, 20 nt, synthetic construct
  source 1..20: mol_type = other RNA
gccctctaacatcctgatgg

SEQ ID NO: 6090 - RNA, 20 nt, synthetic construct
  source 1..20: mol_type = other RNA
ccctctaacatcctgatggt

SEQ ID NO: 6091 - RNA, 20 nt, synthetic construct
  source 1..20: mol_type = other RNA
cctctaacatcctgatggtg

SEQ ID NO: 6092 - RNA, 20 nt, synthetic construct
  source 1..20: mol_type = other RNA
ctctaacatcctgatggtgc

SEQ ID NO: 6093 - RNA, 20 nt, synthetic construct
  source 1..20: mol_type = other RNA
tctaacatcctgatggtgca

SEQ ID NO: 6094 - RNA, 20 nt, synthetic construct
  source 1..20: mol_type = other RNA
ctaacatcctgatggtgcat

SEQ ID NO: 6095 - RNA, 20 nt, synthetic construct
  source 1..20: mol_type = other RNA
tccgagaacatgatcatcac

SEQ ID NO: 6096 - RNA, 20 nt, synthetic construct
  source 1..20: mol_type = other RNA
gtccgagaacatgatcatca

SEQ ID NO: 6097 - RNA, 20 nt, synthetic construct
  source 1..20: mol_type = other RNA
ccgagaacatgatcatcacc

SEQ ID NO: 6098 - RNA, 20 nt, synthetic construct
  source 1..20: mol_type = other RNA
cgagaacatgatcatcaccg

SEQ ID NO: 6099 - RNA, 20 nt, synthetic construct
  source 1..20: mol_type = other RNA
gagaacatgatcatcaccga

SEQ ID NO: 6100 - RNA, 20 nt, synthetic construct
  source 1..20: mol_type = other RNA
agaacatgatcatcaccgaa

SEQ ID NO: 6101 - RNA, 20 nt, synthetic construct
  source 1..20: mol_type = other RNA
ggccgccaagatcatcccct

SEQ ID NO: 6102 - RNA, 20 nt, synthetic construct
  source 1..20: mol_type = other RNA
gccgccaagatcatccccta

SEQ ID NO: 6103 - RNA, 20 nt, synthetic construct
  source 1..20: mol_type = other RNA
ccgccaagatcatcccctac

SEQ ID NO: 6104 - RNA, 20 nt, synthetic construct
  source 1..20: mol_type = other RNA
cgccaagatcatcccctacc

SEQ ID NO: 6105 - RNA, 20 nt, synthetic construct
  source 1..20: mol_type = other RNA
gccaagatcatcccctacca

SEQ ID NO: 6106 - RNA, 20 nt, synthetic construct
  source 1..20: mol_type = other RNA
ccaagatcatcccctaccac

SEQ ID NO: 6107 - RNA, 20 nt, synthetic construct
  source 1..20: mol_type = other RNA
atttcagactttggggttag

SEQ ID NO: 6108 - RNA, 20 nt, synthetic construct
  source 1..20: mol_type = other RNA
tttcagactttggggttagt

SEQ ID NO: 6109 - RNA, 20 nt, synthetic construct
  source 1..20: mol_type = other RNA
ttcagactttggggttagtg

SEQ ID NO: 6110 - RNA, 20 nt, synthetic construct
  source 1..20: mol_type = other RNA
tcagactttggggttagtgc

SEQ ID NO: 6111 - RNA, 20 nt, synthetic construct
  source 1..20: mol_type = other RNA
cagactttggggttagtgct

SEQ ID NO: 6112 - RNA, 20 nt, synthetic construct
  source 1..20: mol_type = other RNA
taaagagatgtgaaagctgg

SEQ ID NO: 6113 - RNA, 20 nt, synthetic construct
  source 1..20: mol_type = other RNA
aaagagatgtgaaagctgga

SEQ ID NO: 6114 - RNA, 20 nt, synthetic construct
  source 1..20: mol_type = other RNA
aagagatgtgaaagctggaa

SEQ ID NO: 6115 - RNA, 20 nt, synthetic construct
  source 1..20: mol_type = other RNA
agagatgtgaaagctggaaa

SEQ ID NO: 6116 - RNA, 20 nt, synthetic construct
  source 1..20: mol_type = other RNA
gagatgtgaaagctggaaac

SEQ ID NO: 6117 - RNA, 20 nt, synthetic construct
  source 1..20: mol_type = other RNA
gctggaaacattcttcttgg

SEQ ID NO: 6118 - RNA, 20 nt, synthetic construct
  source 1..20: mol_type = other RNA
ggaaacattcttcttggaga

SEQ ID NO: 6119 - RNA, 20 nt, synthetic construct
  source 1..20: mol_type = other RNA
agctggaaacattcttcttg

SEQ ID NO: 6120 - RNA, 20 nt, synthetic construct
  source 1..20: mol_type = other RNA
ctggaaacattcttcttgga

SEQ ID NO: 6121 - RNA, 20 nt, synthetic construct
  source 1..20: mol_type = other RNA
tggaaacattcttcttggag

SEQ ID NO: 6122 - RNA, 20 nt, synthetic construct
  source 1..20: mol_type = other RNA
gaaacattcttcttggagaa

SEQ ID NO: 6123 - RNA, 20 nt, synthetic construct
  source 1..20: mol_type = other RNA
gcaatcaaacggataaacct

SEQ ID NO: 6124 - RNA, 20 nt, synthetic construct
  source 1..20: mol_type = other RNA
aatcaaacggataaaccttg

SEQ ID NO: 6125 - RNA, 20 nt, synthetic construct
  source 1..20: mol_type = other RNA
ggcaatcaaacggataaacc

SEQ ID NO: 6126 - RNA, 20 nt, synthetic construct
  source 1..20: mol_type = other RNA
caatcaaacggataaacctt

SEQ ID NO: 6127 - RNA, 20 nt, synthetic construct
  source 1..20: mol_type = other RNA
atcaaacggataaaccttga

SEQ ID NO: 6128 - RNA, 20 nt, synthetic construct
  source 1..20: mol_type = other RNA
tcaaacggataaaccttgag

SEQ ID NO: 6129 - RNA, 20 nt, synthetic construct
  source 1..20: mol_type = other RNA
caaacggataaaccttgaga

SEQ ID NO: 6130 - RNA, 20 nt, synthetic construct
  source 1..20: mol_type = other RNA
ctagctgactttggattctg

SEQ ID NO: 6131 - RNA, 20 nt, synthetic construct
  source 1..20: mol_type = other RNA
ctgactttggattctgtgca

SEQ ID NO: 6132 - RNA, 20 nt, synthetic construct
  source 1..20: mol_type = other RNA
gctgactttggattctgtgc

SEQ ID NO: 6133 - RNA, 20 nt, synthetic construct
  source 1..20: mol_type = other RNA
agctgactttggattctgtg

SEQ ID NO: 6134 - RNA, 20 nt, synthetic construct
  source 1..20: mol_type = other RNA
tagctgactttggattctgt

SEQ ID NO: 6135 - RNA, 20 nt, synthetic construct
  source 1..20: mol_type = other RNA
gagacatcaagagtgacaat

SEQ ID NO: 6136 - RNA, 20 nt, synthetic construct
  source 1..20: mol_type = other RNA
agagacatcaagagtgacaa

SEQ ID NO: 6137 - RNA, 20 nt, synthetic construct
  source 1..20: mol_type = other RNA
cagagacatcaagagtgaca

SEQ ID NO: 6138 - RNA, 20 nt, synthetic construct
  source 1..20: mol_type = other RNA
acagagacatcaagagtgac

SEQ ID NO: 6139 - RNA, 20 nt, synthetic construct
  source 1..20: mol_type = other RNA
cacagagacatcaagagtga

SEQ ID NO: 6140 - RNA, 20 nt, synthetic construct
  source 1..20: mol_type = other RNA
gacaatattctgttgggaat

SEQ ID NO: 6141 - RNA, 20 nt, synthetic construct
  source 1..20: mol_type = other RNA
tgacaatattctgttgggaa

SEQ ID NO: 6142 - RNA, 20 nt, synthetic construct
  source 1..20: mol_type = other RNA
acaatattctgttgggaatg

SEQ ID NO: 6143 - RNA, 20 nt, synthetic construct
  source 1..20: mol_type = other RNA
gtgacaatattctgttggga

SEQ ID NO: 6144 - RNA, 20 nt, synthetic construct
  source 1..20: mol_type = other RNA
agtgacaatattctgttggg

SEQ ID NO: 6145 - RNA, 20 nt, synthetic construct
  source 1..20: mol_type = other RNA
gagtgacaatattctgttgg

SEQ ID NO: 6146 - RNA, 20 nt, synthetic construct
  source 1..20: mol_type = other RNA
cattaagcagatgaatcttc

SEQ ID NO: 6147 - RNA, 20 nt, synthetic construct
  source 1..20: mol_type = other RNA
ttaagcagatgaatcttcag

SEQ ID NO: 6148 - RNA, 20 nt, synthetic construct
  source 1..20: mol_type = other RNA
attaagcagatgaatcttca

SEQ ID NO: 6149 - RNA, 20 nt, synthetic construct
  source 1..20: mol_type = other RNA
ccattaagcagatgaatctt

SEQ ID NO: 6150 - RNA, 20 nt, synthetic construct
  source 1..20: mol_type = other RNA
gccattaagcagatgaatct

SEQ ID NO: 6151 - RNA, 20 nt, synthetic construct
  source 1..20: mol_type = other RNA
ggccattaagcagatgaatc

SEQ ID NO: 6152 - RNA, 20 nt, synthetic construct
  source 1..20: mol_type = other RNA
gtagctgactttggtttctg

SEQ ID NO: 6153 - RNA, 20 nt, synthetic construct
  source 1..20: mol_type = other RNA
tagctgactttggtttctgt

SEQ ID NO: 6154 - RNA, 20 nt, synthetic construct
  source 1..20: mol_type = other RNA
agctgactttggtttctgtg

SEQ ID NO: 6155 - RNA, 20 nt, synthetic construct
  source 1..20: mol_type = other RNA
gctgactttggtttctgtgc

SEQ ID NO: 6156 - RNA, 20 nt, synthetic construct
  source 1..20: mol_type = other RNA
ctgactttggtttctgtgcc

SEQ ID NO: 6157 - RNA, 20 nt, synthetic construct
  source 1..20: mol_type = other RNA
agagacatcaaaagtgacaa

SEQ ID NO: 6158 - RNA, 20 nt, synthetic construct
  source 1..20: mol_type = other RNA
cacagagacatcaaaagtga

SEQ ID NO: 6159 - RNA, 20 nt, synthetic construct
  source 1..20: mol_type = other RNA
acagagacatcaaaagtgac

SEQ ID NO: 6160 - RNA, 20 nt, synthetic construct
  source 1..20: mol_type = other RNA
cagagacatcaaaagtgaca

SEQ ID NO: 6161 - RNA, 20 nt, synthetic construct
  source 1..20: mol_type = other RNA
gagacatcaaaagtgacaat

SEQ ID NO: 6162 - RNA, 20 nt, synthetic construct
  source 1..20: mol_type = other RNA
tatcaaacaaattaatttac

SEQ ID NO: 6163 - RNA, 20 nt, synthetic construct
  source 1..20: mol_type = other RNA
tgctatcaaacaaattaatt

SEQ ID NO: 6164 - RNA, 20 nt, synthetic construct
  source 1..20: mol_type = other RNA
gctatcaaacaaattaattt

SEQ ID NO: 6165 - RNA, 20 nt, synthetic construct
  source 1..20: mol_type = other RNA
ctatcaaacaaattaattta

SEQ ID NO: 6166 - RNA, 20 nt, synthetic construct
  source 1..20: mol_type = other RNA
atcaaacaaattaatttaca

SEQ ID NO: 6167 - RNA, 20 nt, synthetic construct
  source 1..20: mol_type = other RNA
tcaaacaaattaatttacag

SEQ ID NO: 6168 - RNA, 20 nt, synthetic construct
  source 1..20: mol_type = other RNA
caaacaaattaatttacaga

SEQ ID NO: 6169 - RNA, 20 nt, synthetic construct
  source 1..20: mol_type = other RNA
gcagctgactttgggttctg

SEQ ID NO: 6170 - RNA, 20 nt, synthetic construct
  source 1..20: mol_type = other RNA
cagctgactttgggttctgt

SEQ ID NO: 6171 - RNA, 20 nt, synthetic construct
  source 1..20: mol_type = other RNA
agctgactttgggttctgtg

SEQ ID NO: 6172 - RNA, 20 nt, synthetic construct
  source 1..20: mol_type = other RNA
gctgactttgggttctgtgc

SEQ ID NO: 6173 - RNA, 20 nt, synthetic construct
  source 1..20: mol_type = other RNA
ctgactttgggttctgtgcc

SEQ ID NO: 6174 - RNA, 20 nt, synthetic construct
  source 1..20: mol_type = other RNA
catagagatataaagagtga

SEQ ID NO: 6175 - RNA, 20 nt, synthetic construct
  source 1..20: mol_type = other RNA
atagagatataaagagtgac

SEQ ID NO: 6176 - RNA, 20 nt, synthetic construct
  source 1..20: mol_type = other RNA
tagagatataaagagtgaca

SEQ ID NO: 6177 - RNA, 20 nt, synthetic construct
  source 1..20: mol_type = other RNA
agagatataaagagtgacaa

SEQ ID NO: 6178 - RNA, 20 nt, synthetic construct
  source 1..20: mol_type = other RNA
gagatataaagagtgacaat

SEQ ID NO: 6179 - RNA, 20 nt, synthetic construct
  source 1..20: mol_type = other RNA
gagtgacaatattcttctcg

SEQ ID NO: 6180 - RNA, 20 nt, synthetic construct
  source 1..20: mol_type = other RNA
tgacaatattcttctcggga

SEQ ID NO: 6181 - RNA, 20 nt, synthetic construct
  source 1..20: mol_type = other RNA
gacaatattcttctcgggat

SEQ ID NO: 6182 - RNA, 20 nt, synthetic construct
  source 1..20: mol_type = other RNA
agtgacaatattcttctcgg

SEQ ID NO: 6183 - RNA, 20 nt, synthetic construct
  source 1..20: mol_type = other RNA
gtgacaatattcttctcggg

SEQ ID NO: 6184 - RNA, 20 nt, synthetic construct
  source 1..20: mol_type = other RNA
acaatattcttctcgggatg

SEQ ID NO: 6185 - RNA, 20 nt, synthetic construct
  source 1..20: mol_type = other RNA
ggccataaagcagatgaacc

SEQ ID NO: 6186 - RNA, 20 nt, synthetic construct
  source 1..20: mol_type = other RNA
gccataaagcagatgaacct

SEQ ID NO: 6187 - RNA, 20 nt, synthetic construct
  source 1..20: mol_type = other RNA
ccataaagcagatgaacctt

SEQ ID NO: 6188 - RNA, 20 nt, synthetic construct
  source 1..20: mol_type = other RNA
cataaagcagatgaaccttc

SEQ ID NO: 6189 - RNA, 20 nt, synthetic construct
  source 1..20: mol_type = other RNA
ataaagcagatgaaccttca

SEQ ID NO: 6190 - RNA, 20 nt, synthetic construct
  source 1..20: mol_type = other RNA
taaagcagatgaaccttcaa

SEQ ID NO: 6191 - RNA, 20 nt, synthetic construct
  source 1..20: mol_type = other RNA
ctgtcagactttgggttctg

SEQ ID NO: 6192 - RNA, 20 nt, synthetic construct
  source 1..20: mol_type = other RNA
tgtcagactttgggttctgc

SEQ ID NO: 6193 - RNA, 20 nt, synthetic construct
  source 1..20: mol_type = other RNA
gtcagactttgggttctgcg

SEQ ID NO: 6194 - RNA, 20 nt, synthetic construct
  source 1..20: mol_type = other RNA
tcagactttgggttctgcgc

SEQ ID NO: 6195 - RNA, 20 nt, synthetic construct
  source 1..20: mol_type = other RNA
cagactttgggttctgcgcc

SEQ ID NO: 6196 - RNA, 20 nt, synthetic construct
  source 1..20: mol_type = other RNA
ccgggacatcaagagcgact

SEQ ID NO: 6197 - RNA, 20 nt, synthetic construct
  source 1..20: mol_type = other RNA
caccgggacatcaagagcga

SEQ ID NO: 6198 - RNA, 20 nt, synthetic construct
  source 1..20: mol_type = other RNA
accgggacatcaagagcgac

SEQ ID NO: 6199 - RNA, 20 nt, synthetic construct
  source 1..20: mol_type = other RNA
cgggacatcaagagcgactc

SEQ ID NO: 6200 - RNA, 20 nt, synthetic construct
  source 1..20: mol_type = other RNA
gggacatcaagagcgactcg

SEQ ID NO: 6201 - RNA, 20 nt, synthetic construct
  source 1..20: mol_type = other RNA
ggccgtcaagaagatggacc

SEQ ID NO: 6202 - RNA, 20 nt, synthetic construct
  source 1..20: mol_type = other RNA
ccgtcaagaagatggacctg

SEQ ID NO: 6203 - RNA, 20 nt, synthetic construct
  source 1..20: mol_type = other RNA
gccgtcaagaagatggacct

SEQ ID NO: 6204 - RNA, 20 nt, synthetic construct
  source 1..20: mol_type = other RNA
cgtcaagaagatggacctgc

SEQ ID NO: 6205 - RNA, 20 nt, synthetic construct
  source 1..20: mol_type = other RNA
gtcaagaagatggacctgcg

SEQ ID NO: 6206 - RNA, 20 nt, synthetic construct
  source 1..20: mol_type = other RNA
tcaagaagatggacctgcgc

SEQ ID NO: 6207 - RNA, 20 nt, synthetic construct
  source 1..20: mol_type = other RNA
agtgaagaaaatggacctcc

SEQ ID NO: 6208 - RNA, 20 nt, synthetic construct
  source 1..20: mol_type = other RNA
cagtgaagaaaatggacctc

SEQ ID NO: 6209 - RNA, 20 nt, synthetic construct
  source 1..20: mol_type = other RNA
tgaagaaaatggacctccgg

SEQ ID NO: 6210 - RNA, 20 nt, synthetic construct
  source 1..20: mol_type = other RNA
gtgaagaaaatggacctccg

SEQ ID NO: 6211 - RNA, 20 nt, synthetic construct
  source 1..20: mol_type = other RNA
gcagtgaagaaaatggacct

SEQ ID NO: 6212 - RNA, 20 nt, synthetic construct
  source 1..20: mol_type = other RNA
tgcagtgaagaaaatggacc

SEQ ID NO: 6213 - RNA, 20 nt, synthetic construct
  source 1..20: mol_type = other RNA
ctctcggacttcggattctg

SEQ ID NO: 6214 - RNA, 20 nt, synthetic construct
  source 1..20: mol_type = other RNA
tctcggacttcggattctgt

SEQ ID NO: 6215 - RNA, 20 nt, synthetic construct
  source 1..20: mol_type = other RNA
ctcggacttcggattctgtg

SEQ ID NO: 6216 - RNA, 20 nt, synthetic construct
  source 1..20: mol_type = other RNA
tcggacttcggattctgtgc

SEQ ID NO: 6217 - RNA, 20 nt, synthetic construct
  source 1..20: mol_type = other RNA
cggacttcggattctgtgct

SEQ ID NO: 6218 - RNA, 20 nt, synthetic construct
  source 1..20: mol_type = other RNA
caccgggacatcaagagtga

SEQ ID NO: 6219 - RNA, 20 nt, synthetic construct
  source 1..20: mol_type = other RNA
accgggacatcaagagtgac

SEQ ID NO: 6220 - RNA, 20 nt, synthetic construct
  source 1..20: mol_type = other RNA
ccgggacatcaagagtgact

SEQ ID NO: 6221 - RNA, 20 nt, synthetic construct
  source 1..20: mol_type = other RNA
cgggacatcaagagtgactc

SEQ ID NO: 6222 - RNA, 20 nt, synthetic construct
  source 1..20: mol_type = other RNA
gggacatcaagagtgactcc

SEQ ID NO: 6223 - RNA, 20 nt, synthetic construct
  source 1..20: mol_type = other RNA
ccgtcaagatgatggacctc

SEQ ID NO: 6224 - RNA, 20 nt, synthetic construct
  source 1..20: mol_type = other RNA
cgtcaagatgatggacctca

SEQ ID NO: 6225 - RNA, 20 nt, synthetic construct
  source 1..20: mol_type = other RNA
ggccgtcaagatgatggacc

SEQ ID NO: 6226 - RNA, 20 nt, synthetic construct
  source 1..20: mol_type = other RNA
gccgtcaagatgatggacct

SEQ ID NO: 6227 - RNA, 20 nt, synthetic construct
  source 1..20: mol_type = other RNA
gtcaagatgatggacctcag

SEQ ID NO: 6228 - RNA, 20 nt, synthetic construct
  source 1..20: mol_type = other RNA
tcaagatgatggacctcagg

SEQ ID NO: 6229 - RNA, 20 nt, synthetic construct
  source 1..20: mol_type = other RNA
ctgatagactttggctcggc

SEQ ID NO: 6230 - RNA, 20 nt, synthetic construct
  source 1..20: mol_type = other RNA
tagactttggctcggccgcc

SEQ ID NO: 6231 - RNA, 20 nt, synthetic construct
  source 1..20: mol_type = other RNA
atagactttggctcggccgc

SEQ ID NO: 6232 - RNA, 20 nt, synthetic construct
  source 1..20: mol_type = other RNA
gatagactttggctcggccg

SEQ ID NO: 6233 - RNA, 20 nt, synthetic construct
  source 1..20: mol_type = other RNA
tgatagactttggctcggcc

SEQ ID NO: 6234 - RNA, 20 nt, synthetic construct
  source 1..20: mol_type = other RNA
ccgtgacatcaaggatgaga

SEQ ID NO: 6235 - RNA, 20 nt, synthetic construct
  source 1..20: mol_type = other RNA
accgtgacatcaaggatgag

SEQ ID NO: 6236 - RNA, 20 nt, synthetic construct
  source 1..20: mol_type = other RNA
caccgtgacatcaaggatga

SEQ ID NO: 6237 - RNA, 20 nt, synthetic construct
  source 1..20: mol_type = other RNA
gtgacatcaaggatgagaac

SEQ ID NO: 6238 - RNA, 20 nt, synthetic construct
  source 1..20: mol_type = other RNA
cgtgacatcaaggatgagaa

SEQ ID NO: 6239 - RNA, 20 nt, synthetic construct
  source 1..20: mol_type = other RNA
gagaacatcgtgatcgccga

SEQ ID NO: 6240 - RNA, 20 nt, synthetic construct
  source 1..20: mol_type = other RNA
tgagaacatcgtgatcgccg

SEQ ID NO: 6241 - RNA, 20 nt, synthetic construct
  source 1..20: mol_type = other RNA
gatgagaacatcgtgatcgc

SEQ ID NO: 6242 - RNA, 20 nt, synthetic construct
  source 1..20: mol_type = other RNA
agaacatcgtgatcgccgag

SEQ ID NO: 6243 - RNA, 20 nt, synthetic construct
  source 1..20: mol_type = other RNA
atgagaacatcgtgatcgcc

SEQ ID NO: 6244 - RNA, 20 nt, synthetic construct
  source 1..20: mol_type = other RNA
ggatgagaacatcgtgatcg

SEQ ID NO: 6245 - RNA, 20 nt, synthetic construct
  source 1..20: mol_type = other RNA
ggtgaagtttattaagaagg

SEQ ID NO: 6246 - RNA, 20 nt, synthetic construct
  source 1..20: mol_type = other RNA
gtggtgaagtttattaagaa

SEQ ID NO: 6247 - RNA, 20 nt, synthetic construct
  source 1..20: mol_type = other RNA
ggtggtgaagtttattaaga

SEQ ID NO: 6248 - RNA, 20 nt, synthetic construct
  source 1..20: mol_type = other RNA
tgaagtttattaagaaggag

SEQ ID NO: 6249 - RNA, 20 nt, synthetic construct
  source 1..20: mol_type = other RNA
gtgaagtttattaagaagga

SEQ ID NO: 6250 - RNA, 20 nt, synthetic construct
  source 1..20: mol_type = other RNA
tggtgaagtttattaagaag

SEQ ID NO: 6251 - RNA, 20 nt, synthetic construct
  source 1..20: mol_type = other RNA
gtgatgtaggagtctctcta

SEQ ID NO: 6252 - RNA, 20 nt, synthetic construct
  source 1..20: mol_type = other RNA
tgtgatgtaggagtctctct

SEQ ID NO: 6253 - RNA, 20 nt, synthetic construct
  source 1..20: mol_type = other RNA
ctgtgatgtaggagtctctc

SEQ ID NO: 6254 - RNA, 20 nt, synthetic construct
  source 1..20: mol_type = other RNA
tctgtgatgtaggagtctct

SEQ ID NO: 6255 - RNA, 20 nt, synthetic construct
  source 1..20: mol_type = other RNA
atctgtgatgtaggagtctc

SEQ ID NO: 6256 - RNA, 20 nt, synthetic construct
  source 1..20: mol_type = other RNA
ggagacataaagtcttcaaa

SEQ ID NO: 6257 - RNA, 20 nt, synthetic construct
  source 1..20: mol_type = other RNA
gagacataaagtcttcaaat

SEQ ID NO: 6258 - RNA, 20 nt, synthetic construct
  source 1..20: mol_type = other RNA
tggagacataaagtcttcaa

SEQ ID NO: 6259 - RNA, 20 nt, synthetic construct
  source 1..20: mol_type = other RNA
atggagacataaagtcttca

SEQ ID NO: 6260 - RNA, 20 nt, synthetic construct
  source 1..20: mol_type = other RNA
catggagacataaagtcttc

SEQ ID NO: 6261 - RNA, 20 nt, synthetic construct
  source 1..20: mol_type = other RNA
tcaaatgttgtaattaaagg

SEQ ID NO: 6262 - RNA, 20 nt, synthetic construct
  source 1..20: mol_type = other RNA
cttcaaatgttgtaattaaa

SEQ ID NO: 6263 - RNA, 20 nt, synthetic construct
  source 1..20: mol_type = other RNA
tcttcaaatgttgtaattaa

SEQ ID NO: 6264 - RNA, 20 nt, synthetic construct
  source 1..20: mol_type = other RNA
caaatgttgtaattaaaggc

SEQ ID NO: 6265 - RNA, 20 nt, synthetic construct
  source 1..20: mol_type = other RNA
ttcaaatgttgtaattaaag

SEQ ID NO: 6266 - RNA, 20 nt, synthetic construct
  source 1..20: mol_type = other RNA
gtcttcaaatgttgtaatta

SEQ ID NO: 6267 - RNA, 20 nt, synthetic construct
  source 1..20: mol_type = other RNA
tgtgactttggcctggccag

SEQ ID NO: 6268 - RNA, 20 nt, synthetic construct
  source 1..20: mol_type = other RNA
ctgtgactttggcctggcca

SEQ ID NO: 6269 - RNA, 20 nt, synthetic construct
  source 1..20: mol_type = other RNA
gtgactttggcctggccaga

SEQ ID NO: 6270 - RNA, 20 nt, synthetic construct
  source 1..20: mol_type = other RNA
cgtgatctggctgctcgcaa

SEQ ID NO: 6271 - RNA, 20 nt, synthetic construct
  source 1..20: mol_type = other RNA
caccgtgatctggctgctcg

SEQ ID NO: 6272 - RNA, 20 nt, synthetic construct
  source 1..20: mol_type = other RNA
accgtgatctggctgctcgc

SEQ ID NO: 6273 - RNA, 20 nt, synthetic construct
  source 1..20: mol_type = other RNA
ccgtgatctggctgctcgca

SEQ ID NO: 6274 - RNA, 20 nt, synthetic construct
  source 1..20: mol_type = other RNA
gtgatctggctgctcgcaac

SEQ ID NO: 6275 - RNA, 20 nt, synthetic construct
  source 1..20: mol_type = other RNA
cgcaacgtcctcctggcaca

SEQ ID NO: 6276 - RNA, 20 nt, synthetic construct
  source 1..20: mol_type = other RNA
gcaacgtcctcctggcacaa

SEQ ID NO: 6277 - RNA, 20 nt, synthetic construct
  source 1..20: mol_type = other RNA
tgctcgcaacgtcctcctgg

SEQ ID NO: 6278 - RNA, 20 nt, synthetic construct
  source 1..20: mol_type = other RNA
gctcgcaacgtcctcctggc

SEQ ID NO: 6279 - RNA, 20 nt, synthetic construct
  source 1..20: mol_type = other RNA
ctcgcaacgtcctcctggca

SEQ ID NO: 6280 - RNA, 20 nt, synthetic construct
  source 1..20: mol_type = other RNA
tcgcaacgtcctcctggcac

SEQ ID NO: 6281 - RNA, 20 nt, synthetic construct
  source 1..20: mol_type = other RNA
agtgaagatgctaaaacgta

SEQ ID NO: 6282 - RNA, 20 nt, synthetic construct
  source 1..20: mol_type = other RNA
tgaagatgctaaaacgtaag

SEQ ID NO: 6283 - RNA, 20 nt, synthetic construct
  source 1..20: mol_type = other RNA
tgcagtgaagatgctaaaac

SEQ ID NO: 6284 - RNA, 20 nt, synthetic construct
  source 1..20: mol_type = other RNA
gcagtgaagatgctaaaacg

SEQ ID NO: 6285 - RNA, 20 nt, synthetic construct
  source 1..20: mol_type = other RNA
cagtgaagatgctaaaacgt

SEQ ID NO: 6286 - RNA, 20 nt, synthetic construct
  source 1..20: mol_type = other RNA
gtgaagatgctaaaacgtaa

SEQ ID NO: 6287 - RNA, 20 nt, synthetic construct
  source 1..20: mol_type = other RNA
tgtgactttggcctggctcg

SEQ ID NO: 6288 - RNA, 20 nt, synthetic construct
  source 1..20: mol_type = other RNA
tctgtgactttggcctggct

SEQ ID NO: 6289 - RNA, 20 nt, synthetic construct
  source 1..20: mol_type = other RNA
gtgactttggcctggctcga

SEQ ID NO: 6290 - RNA, 20 nt, synthetic construct
  source 1..20: mol_type = other RNA
ctgtgactttggcctggctc

SEQ ID NO: 6291 - RNA, 20 nt, synthetic construct
  source 1..20: mol_type = other RNA
agagacctggcggctaggaa

SEQ ID NO: 6292 - RNA, 20 nt, synthetic construct
  source 1..20: mol_type = other RNA
gagacctggcggctaggaac

SEQ ID NO: 6293 - RNA, 20 nt, synthetic construct
  source 1..20: mol_type = other RNA
cagagacctggcggctagga

SEQ ID NO: 6294 - RNA, 20 nt, synthetic construct
  source 1..20: mol_type = other RNA
acagagacctggcggctagg

SEQ ID NO: 6295 - RNA, 20 nt, synthetic construct
  source 1..20: mol_type = other RNA
cacagagacctggcggctag

SEQ ID NO: 6296 - RNA, 20 nt, synthetic construct
  source 1..20: mol_type = other RNA
ggaacgtgctcatctgtgaa

SEQ ID NO: 6297 - RNA, 20 nt, synthetic construct
  source 1..20: mol_type = other RNA
aggaacgtgctcatctgtga

SEQ ID NO: 6298 - RNA, 20 nt, synthetic construct
  source 1..20: mol_type = other RNA
gctaggaacgtgctcatctg

SEQ ID NO: 6299 - RNA, 20 nt, synthetic construct
  source 1..20: mol_type = other RNA
taggaacgtgctcatctgtg

SEQ ID NO: 6300 - RNA, 20 nt, synthetic construct
  source 1..20: mol_type = other RNA
ctaggaacgtgctcatctgt

SEQ ID NO: 6301 - RNA, 20 nt, synthetic construct
  source 1..20: mol_type = other RNA
ggctaggaacgtgctcatct

SEQ ID NO: 6302 - RNA, 20 nt, synthetic construct
  source 1..20: mol_type = other RNA
cgtcaagatgcttaaatgtg

SEQ ID NO: 6303 - RNA, 20 nt, synthetic construct
  source 1..20: mol_type = other RNA
gccgtcaagatgcttaaatg

SEQ ID NO: 6304 - RNA, 20 nt, synthetic construct
  source 1..20: mol_type = other RNA
tcaagatgcttaaatgtgag

SEQ ID NO: 6305 - RNA, 20 nt, synthetic construct
  source 1..20: mol_type = other RNA
gtcaagatgcttaaatgtga

SEQ ID NO: 6306 - RNA, 20 nt, synthetic construct
  source 1..20: mol_type = other RNA
ccgtcaagatgcttaaatgt

SEQ ID NO: 6307 - RNA, 20 nt, synthetic construct
  source 1..20: mol_type = other RNA
ggccgtcaagatgcttaaat

SEQ ID NO: 6308 - RNA, 20 nt, synthetic construct
  source 1..20: mol_type = other RNA
caccgagatcttaagcctga

SEQ ID NO: 6309 - RNA, 20 nt, synthetic construct
  source 1..20: mol_type = other RNA
accgagatcttaagcctgat

SEQ ID NO: 6310 - RNA, 20 nt, synthetic construct
  source 1..20: mol_type = other RNA
ccgagatcttaagcctgata

SEQ ID NO: 6311 - RNA, 20 nt, synthetic construct
  source 1..20: mol_type = other RNA
cgagatcttaagcctgataa

SEQ ID NO: 6312 - RNA, 20 nt, synthetic construct
  source 1..20: mol_type = other RNA
gagatcttaagcctgataac

SEQ ID NO: 6313 - RNA, 20 nt, synthetic construct
  source 1..20: mol_type = other RNA
gcctgataacatcctgattt

SEQ ID NO: 6314 - RNA, 20 nt, synthetic construct
  source 1..20: mol_type = other RNA
cctgataacatcctgatttc

SEQ ID NO: 6315 - RNA, 20 nt, synthetic construct
  source 1..20: mol_type = other RNA
ctgataacatcctgatttct

SEQ ID NO: 6316 - RNA, 20 nt, synthetic construct
  source 1..20: mol_type = other RNA
tgataacatcctgatttctc

SEQ ID NO: 6317 - RNA, 20 nt, synthetic construct
  source 1..20: mol_type = other RNA
gataacatcctgatttctca

SEQ ID NO: 6318 - RNA, 20 nt, synthetic construct
  source 1..20: mol_type = other RNA
ataacatcctgatttctcaa

SEQ ID NO: 6319 - RNA, 20 nt, synthetic construct
  source 1..20: mol_type = other RNA
gtgaagaaaattcgatgtca

SEQ ID NO: 6320 - RNA, 20 nt, synthetic construct
  source 1..20: mol_type = other RNA
ggcagtgaagaaaattcgat

SEQ ID NO: 6321 - RNA, 20 nt, synthetic construct
  source 1..20: mol_type = other RNA
gcagtgaagaaaattcgatg

SEQ ID NO: 6322 - RNA, 20 nt, synthetic construct
  source 1..20: mol_type = other RNA
cagtgaagaaaattcgatgt

SEQ ID NO: 6323 - RNA, 20 nt, synthetic construct
  source 1..20: mol_type = other RNA
agtgaagaaaattcgatgtc

SEQ ID NO: 6324 - RNA, 20 nt, synthetic construct
  source 1..20: mol_type = other RNA
tgaagaaaattcgatgtcac

SEQ ID NO: 6325 - RNA, 20 nt, synthetic construct
  source 1..20: mol_type = other RNA
tacagggaccttaaaccgga

SEQ ID NO: 6326 - RNA, 20 nt, synthetic construct
  source 1..20: mol_type = other RNA
acagggaccttaaaccggaa

SEQ ID NO: 6327 - RNA, 20 nt, synthetic construct
  source 1..20: mol_type = other RNA
cagggaccttaaaccggaaa

SEQ ID NO: 6328 - RNA, 20 nt, synthetic construct
  source 1..20: mol_type = other RNA
agggaccttaaaccggaaaa

SEQ ID NO: 6329 - RNA, 20 nt, synthetic construct
  source 1..20: mol_type = other RNA
gggaccttaaaccggaaaac

SEQ ID NO: 6330 - RNA, 20 nt, synthetic construct
  source 1..20: mol_type = other RNA
tgaagttaaaattctggaga

SEQ ID NO: 6331 - RNA, 20 nt, synthetic construct
  source 1..20: mol_type = other RNA
aagttaaaattctggagaag

SEQ ID NO: 6332 - RNA, 20 nt, synthetic construct
  source 1..20: mol_type = other RNA
gaagttaaaattctggagaa

SEQ ID NO: 6333 - RNA, 20 nt, synthetic construct
  source 1..20: mol_type = other RNA
agttaaaattctggagaagc

SEQ ID NO: 6334 - RNA, 20 nt, synthetic construct
  source 1..20: mol_type = other RNA
gttaaaattctggagaagcg

SEQ ID NO: 6335 - RNA, 20 nt, synthetic construct
  source 1..20: mol_type = other RNA
ttaaaattctggagaagcga

SEQ ID NO: 6336 - RNA, 20 nt, synthetic construct
  source 1..20: mol_type = other RNA
taaaattctggagaagcgac

SEQ ID NO: 6337 - RNA, 20 nt, synthetic construct
  source 1..20: mol_type = other RNA
gcgatctacgcctagagaac

SEQ ID NO: 6338 - RNA, 20 nt, synthetic construct
  source 1..20: mol_type = other RNA
tgcgatctacgcctagagaa

SEQ ID NO: 6339 - RNA, 20 nt, synthetic construct
  source 1..20: mol_type = other RNA
ctgcgatctacgcctagaga

SEQ ID NO: 6340 - RNA, 20 nt, synthetic construct
  source 1..20: mol_type = other RNA
actgcgatctacgcctagag

SEQ ID NO: 6341 - RNA, 20 nt, synthetic construct
  source 1..20: mol_type = other RNA
cactgcgatctacgcctaga

SEQ ID NO: 6342 - RNA, 20 nt, synthetic construct
  source 1..20: mol_type = other RNA
agaacctgctacttgtccac

SEQ ID NO: 6343 - RNA, 20 nt, synthetic construct
  source 1..20: mol_type = other RNA
gagaacctgctacttgtcca

SEQ ID NO: 6344 - RNA, 20 nt, synthetic construct
  source 1..20: mol_type = other RNA
agagaacctgctacttgtcc

SEQ ID NO: 6345 - RNA, 20 nt, synthetic construct
  source 1..20: mol_type = other RNA
tagagaacctgctacttgtc

SEQ ID NO: 6346 - RNA, 20 nt, synthetic construct
  source 1..20: mol_type = other RNA
ctagagaacctgctacttgt

SEQ ID NO: 6347 - RNA, 20 nt, synthetic construct
  source 1..20: mol_type = other RNA
cctagagaacctgctacttg

SEQ ID NO: 6348 - RNA, 20 nt, synthetic construct
  source 1..20: mol_type = other RNA
tcaaggtaagaaaatattat

SEQ ID NO: 6349 - RNA, 20 nt, synthetic construct
  source 1..20: mol_type = other RNA
gtcaaggtaagaaaatatta

SEQ ID NO: 6350 - RNA, 20 nt, synthetic construct
  source 1..20: mol_type = other RNA
agtcaaggtaagaaaatatt

SEQ ID NO: 6351 - RNA, 20 nt, synthetic construct
  source 1..20: mol_type = other RNA
cagtcaaggtaagaaaatat

SEQ ID NO: 6352 - RNA, 20 nt, synthetic construct
  source 1..20: mol_type = other RNA
gcagtcaaggtaagaaaata

SEQ ID NO: 6353 - RNA, 20 nt, synthetic construct
  source 1..20: mol_type = other RNA
tgcagtcaaggtaagaaaat

SEQ ID NO: 6354 - RNA, 20 nt, synthetic construct
  source 1..20: mol_type = other RNA
tcactgactttggccgcgtc

SEQ ID NO: 6355 - RNA, 20 nt, synthetic construct
  source 1..20: mol_type = other RNA
ctgactttggccgcgtctgt

SEQ ID NO: 6356 - RNA, 20 nt, synthetic construct
  source 1..20: mol_type = other RNA
actgactttggccgcgtctg

SEQ ID NO: 6357 - RNA, 20 nt, synthetic construct
  source 1..20: mol_type = other RNA
cactgactttggccgcgtct

SEQ ID NO: 6358 - RNA, 20 nt, synthetic construct
  source 1..20: mol_type = other RNA
ctcactgactttggccgcgt

SEQ ID NO: 6359 - RNA, 20 nt, synthetic construct
  source 1..20: mol_type = other RNA
ccggagaacttgctgctggt

SEQ ID NO: 6360 - RNA, 20 nt, synthetic construct
  source 1..20: mol_type = other RNA
gccggagaacttgctgctgg

SEQ ID NO: 6361 - RNA, 20 nt, synthetic construct
  source 1..20: mol_type = other RNA
agaacttgctgctggtggca

SEQ ID NO: 6362 - RNA, 20 nt, synthetic construct
  source 1..20: mol_type = other RNA
gagaacttgctgctggtggc

SEQ ID NO: 6363 - RNA, 20 nt, synthetic construct
  source 1..20: mol_type = other RNA
ggagaacttgctgctggtgg

SEQ ID NO: 6364 - RNA, 20 nt, synthetic construct
  source 1..20: mol_type = other RNA
cggagaacttgctgctggtg

SEQ ID NO: 6365 - RNA, 20 nt, synthetic construct
  source 1..20: mol_type = other RNA
gtcgccaaggtgagccccac

SEQ ID NO: 6366 - RNA, 20 nt, synthetic construct
  source 1..20: mol_type = other RNA
ccaaggtgagccccacagcc

SEQ ID NO: 6367 - RNA, 20 nt, synthetic construct
  source 1..20: mol_type = other RNA
gccaaggtgagccccacagc

SEQ ID NO: 6368 - RNA, 20 nt, synthetic construct
  source 1..20: mol_type = other RNA
cgccaaggtgagccccacag

SEQ ID NO: 6369 - RNA, 20 nt, synthetic construct
  source 1..20: mol_type = other RNA
tcgccaaggtgagccccaca

SEQ ID NO: 6370 - RNA, 20 nt, synthetic construct
  source 1..20: mol_type = other RNA
ggtcgccaaggtgagcccca

SEQ ID NO: 6371 - RNA, 20 nt, synthetic construct
  source 1..20: mol_type = other RNA
cgggacctgaagcccgagaa

SEQ ID NO: 6372 - RNA, 20 nt, synthetic construct
  source 1..20: mol_type = other RNA
ccgggacctgaagcccgaga

SEQ ID NO: 6373 - RNA, 20 nt, synthetic construct
  source 1..20: mol_type = other RNA
accgggacctgaagcccgag

SEQ ID NO: 6374 - RNA, 20 nt, synthetic construct
  source 1..20: mol_type = other RNA
caccgggacctgaagcccga

SEQ ID NO: 6375 - RNA, 20 nt, synthetic construct
  source 1..20: mol_type = other RNA
gggacctgaagcccgagaac

SEQ ID NO: 6376 - RNA, 20 nt, synthetic construct
  source 1..20: mol_type = other RNA
cccgagaacattctcttgga

SEQ ID NO: 6377 - RNA, 20 nt, synthetic construct
  source 1..20: mol_type = other RNA
agaacattctcttggatgac

SEQ ID NO: 6378 - RNA, 20 nt, synthetic construct
  source 1..20: mol_type = other RNA
gagaacattctcttggatga

SEQ ID NO: 6379 - RNA, 20 nt, synthetic construct
  source 1..20: mol_type = other RNA
cgagaacattctcttggatg

SEQ ID NO: 6380 - RNA, 20 nt, synthetic construct
  source 1..20: mol_type = other RNA
ccgagaacattctcttggat

SEQ ID NO: 6381 - RNA, 20 nt, synthetic construct
  source 1..20: mol_type = other RNA
gcccgagaacattctcttgg

SEQ ID NO: 6382 - RNA, 20 nt, synthetic construct
  source 1..20: mol_type = other RNA
tgaaggtcatcgacgtcacc

SEQ ID NO: 6383 - RNA, 20 nt, synthetic construct
  source 1..20: mol_type = other RNA
gtgaaggtcatcgacgtcac

SEQ ID NO: 6384 - RNA, 20 nt, synthetic construct
  source 1..20: mol_type = other RNA
cgtgaaggtcatcgacgtca

SEQ ID NO: 6385 - RNA, 20 nt, synthetic construct
  source 1..20: mol_type = other RNA
ccgtgaaggtcatcgacgtc

SEQ ID NO: 6386 - RNA, 20 nt, synthetic construct
  source 1..20: mol_type = other RNA
gccgtgaaggtcatcgacgt

SEQ ID NO: 6387 - RNA, 20 nt, synthetic construct
  source 1..20: mol_type = other RNA
cgccgtgaaggtcatcgacg

SEQ ID NO: 6388 - RNA, 20 nt, synthetic construct
  source 1..20: mol_type = other RNA
tttcagatttcgggttctcc

SEQ ID NO: 6389 - RNA, 20 nt, synthetic construct
  source 1..20: mol_type = other RNA
ctttcagatttcgggttctc

SEQ ID NO: 6390 - RNA, 20 nt, synthetic construct
  source 1..20: mol_type = other RNA
ttcagatttcgggttctcct

SEQ ID NO: 6391 - RNA, 20 nt, synthetic construct
  source 1..20: mol_type = other RNA
tcagatttcgggttctcctg

SEQ ID NO: 6392 - RNA, 20 nt, synthetic construct
  source 1..20: mol_type = other RNA
cagatttcgggttctcctgc

SEQ ID NO: 6393 - RNA, 20 nt, synthetic construct
  source 1..20: mol_type = other RNA
catcgagatctgaagcccga

SEQ ID NO: 6394 - RNA, 20 nt, synthetic construct
  source 1..20: mol_type = other RNA
atcgagatctgaagcccgag

SEQ ID NO: 6395 - RNA, 20 nt, synthetic construct
  source 1..20: mol_type = other RNA
tcgagatctgaagcccgaga

SEQ ID NO: 6396 - RNA, 20 nt, synthetic construct
  source 1..20: mol_type = other RNA
cgagatctgaagcccgagaa

SEQ ID NO: 6397 - RNA, 20 nt, synthetic construct
  source 1..20: mol_type = other RNA
gagatctgaagcccgagaat

SEQ ID NO: 6398 - RNA, 20 nt, synthetic construct
  source 1..20: mol_type = other RNA
cccgagaatattctcctaga

SEQ ID NO: 6399 - RNA, 20 nt, synthetic construct
  source 1..20: mol_type = other RNA
gcccgagaatattctcctag

SEQ ID NO: 6400 - RNA, 20 nt, synthetic construct
  source 1..20: mol_type = other RNA
ccgagaatattctcctagat

SEQ ID NO: 6401 - RNA, 20 nt, synthetic construct
  source 1..20: mol_type = other RNA
cgagaatattctcctagatg

SEQ ID NO: 6402 - RNA, 20 nt, synthetic construct
  source 1..20: mol_type = other RNA
gagaatattctcctagatga

SEQ ID NO: 6403 - RNA, 20 nt, synthetic construct
  source 1..20: mol_type = other RNA
agaatattctcctagatgac

SEQ ID NO: 6404 - RNA, 20 nt, synthetic construct
  source 1..20: mol_type = other RNA
tgcggtgaagattatggaag

SEQ ID NO: 6405 - RNA, 20 nt, synthetic construct
  source 1..20: mol_type = other RNA
gtgaagattatggaagtgac

SEQ ID NO: 6406 - RNA, 20 nt, synthetic construct
  source 1..20: mol_type = other RNA
gcggtgaagattatggaagt

SEQ ID NO: 6407 - RNA, 20 nt, synthetic construct
  source 1..20: mol_type = other RNA
cggtgaagattatggaagtg

SEQ ID NO: 6408 - RNA, 20 nt, synthetic construct
  source 1..20: mol_type = other RNA
ggtgaagattatggaagtga

SEQ ID NO: 6409 - RNA, 20 nt, synthetic construct
  source 1..20: mol_type = other RNA
tgaagattatggaagtgaca

SEQ ID NO: 6410 - RNA, 20 nt, synthetic construct
  source 1..20: mol_type = other RNA
gccatagacaatgggctggc

SEQ ID NO: 6411 - RNA, 20 nt, synthetic construct
  source 1..20: mol_type = other RNA
ccatagacaatgggctggcc

SEQ ID NO: 6412 - RNA, 20 nt, synthetic construct
  source 1..20: mol_type = other RNA
catagacaatgggctggcct

SEQ ID NO: 6413 - RNA, 20 nt, synthetic construct
  source 1..20: mol_type = other RNA
atagacaatgggctggcctt

SEQ ID NO: 6414 - RNA, 20 nt, synthetic construct
  source 1..20: mol_type = other RNA
tagacaatgggctggccttc

SEQ ID NO: 6415 - RNA, 20 nt, synthetic construct
  source 1..20: mol_type = other RNA
cagatcgaggcaatgacaac

SEQ ID NO: 6416 - RNA, 20 nt, synthetic construct
  source 1..20: mol_type = other RNA
ttcacagatcgaggcaatga

SEQ ID NO: 6417 - RNA, 20 nt, synthetic construct
  source 1..20: mol_type = other RNA
tcacagatcgaggcaatgac

SEQ ID NO: 6418 - RNA, 20 nt, synthetic construct
  source 1..20: mol_type = other RNA
cacagatcgaggcaatgaca

SEQ ID NO: 6419 - RNA, 20 nt, synthetic construct
  source 1..20: mol_type = other RNA
acagatcgaggcaatgacaa

SEQ ID NO: 6420 - RNA, 20 nt, synthetic construct
  source 1..20: mol_type = other RNA
gacaactggctgattaaata

SEQ ID NO: 6421 - RNA, 20 nt, synthetic construct
  source 1..20: mol_type = other RNA
caatgacaactggctgatta

SEQ ID NO: 6422 - RNA, 20 nt, synthetic construct
  source 1..20: mol_type = other RNA
aatgacaactggctgattaa

SEQ ID NO: 6423 - RNA, 20 nt, synthetic construct
  source 1..20: mol_type = other RNA
atgacaactggctgattaaa

SEQ ID NO: 6424 - RNA, 20 nt, synthetic construct
  source 1..20: mol_type = other RNA
tgacaactggctgattaaat

SEQ ID NO: 6425 - RNA, 20 nt, synthetic construct
  source 1..20: mol_type = other RNA
acaactggctgattaaatat

SEQ ID NO: 6426 - RNA, 20 nt, synthetic construct
  source 1..20: mol_type = other RNA
gtcttcaaacccaagaatga

SEQ ID NO: 6427 - RNA, 20 nt, synthetic construct
  source 1..20: mol_type = other RNA
cttcaaacccaagaatgaag

SEQ ID NO: 6428 - RNA, 20 nt, synthetic construct
  source 1..20: mol_type = other RNA
tgtcttcaaacccaagaatg

SEQ ID NO: 6429 - RNA, 20 nt, synthetic construct
  source 1..20: mol_type = other RNA
tcttcaaacccaagaatgaa

SEQ ID NO: 6430 - RNA, 20 nt, synthetic construct
  source 1..20: mol_type = other RNA
ttcaaacccaagaatgaaga

SEQ ID NO: 6431 - RNA, 20 nt, synthetic construct
  source 1..20: mol_type = other RNA
tcaaacccaagaatgaagag

SEQ ID NO: 6432 - RNA, 20 nt, synthetic construct
  source 1..20: mol_type = other RNA
caaacccaagaatgaagagc

SEQ ID NO: 6433 - RNA, 20 nt, synthetic construct
  source 1..20: mol_type = other RNA
gcaattgataatggtctagc

SEQ ID NO: 6434 - RNA, 20 nt, synthetic construct
  source 1..20: mol_type = other RNA
caattgataatggtctagca

SEQ ID NO: 6435 - RNA, 20 nt, synthetic construct
  source 1..20: mol_type = other RNA
aattgataatggtctagcat

SEQ ID NO: 6436 - RNA, 20 nt, synthetic construct
  source 1..20: mol_type = other RNA
attgataatggtctagcatt

SEQ ID NO: 6437 - RNA, 20 nt, synthetic construct
  source 1..20: mol_type = other RNA
ttgataatggtctagcattt

SEQ ID NO: 6438 - RNA, 20 nt, synthetic construct
  source 1..20: mol_type = other RNA
aagacaggggcaatgataat

SEQ ID NO: 6439 - RNA, 20 nt, synthetic construct
  source 1..20: mol_type = other RNA
ttgaaagacaggggcaatga

SEQ ID NO: 6440 - RNA, 20 nt, synthetic construct
  source 1..20: mol_type = other RNA
tgaaagacaggggcaatgat

SEQ ID NO: 6441 - RNA, 20 nt, synthetic construct
  source 1..20: mol_type = other RNA
gaaagacaggggcaatgata

SEQ ID NO: 6442 - RNA, 20 nt, synthetic construct
  source 1..20: mol_type = other RNA
aaagacaggggcaatgataa

SEQ ID NO: 6443 - RNA, 20 nt, synthetic construct
  source 1..20: mol_type = other RNA
gataattggttagtcagata

SEQ ID NO: 6444 - RNA, 20 nt, synthetic construct
  source 1..20: mol_type = other RNA
caatgataattggttagtca

SEQ ID NO: 6445 - RNA, 20 nt, synthetic construct
  source 1..20: mol_type = other RNA
aatgataattggttagtcag

SEQ ID NO: 6446 - RNA, 20 nt, synthetic construct
  source 1..20: mol_type = other RNA
atgataattggttagtcaga

SEQ ID NO: 6447 - RNA, 20 nt, synthetic construct
  source 1..20: mol_type = other RNA
tgataattggttagtcagat

SEQ ID NO: 6448 - RNA, 20 nt, synthetic construct
  source 1..20: mol_type = other RNA
ataattggttagtcagatac

SEQ ID NO: 6449 - RNA, 20 nt, synthetic construct
  source 1..20: mol_type = other RNA
gtgtttaaacccaaatcaga

SEQ ID NO: 6450 - RNA, 20 nt, synthetic construct
  source 1..20: mol_type = other RNA
gtttaaacccaaatcagaag

SEQ ID NO: 6451 - RNA, 20 nt, synthetic construct
  source 1..20: mol_type = other RNA
tgtgtttaaacccaaatcag

SEQ ID NO: 6452 - RNA, 20 nt, synthetic construct
  source 1..20: mol_type = other RNA
tgtttaaacccaaatcagaa

SEQ ID NO: 6453 - RNA, 20 nt, synthetic construct
  source 1..20: mol_type = other RNA
tttaaacccaaatcagaaga

SEQ ID NO: 6454 - RNA, 20 nt, synthetic construct
  source 1..20: mol_type = other RNA
ttaaacccaaatcagaagag

SEQ ID NO: 6455 - RNA, 20 nt, synthetic construct
  source 1..20: mol_type = other RNA
taaacccaaatcagaagagc

SEQ ID NO: 6456 - RNA, 20 nt, synthetic construct
  source 1..20: mol_type = other RNA
gcagactttggcttcatgtt

SEQ ID NO: 6457 - RNA, 20 nt, synthetic construct
  source 1..20: mol_type = other RNA
cagactttggcttcatgttt

SEQ ID NO: 6458 - RNA, 20 nt, synthetic construct
  source 1..20: mol_type = other RNA
tgcagactttggcttcatgt

SEQ ID NO: 6459 - RNA, 20 nt, synthetic construct
  source 1..20: mol_type = other RNA
ttgcagactttggcttcatg

SEQ ID NO: 6460 - RNA, 20 nt, synthetic construct
  source 1..20: mol_type = other RNA
tttgcagactttggcttcat

SEQ ID NO: 6461 - RNA, 20 nt, synthetic construct
  source 1..20: mol_type = other RNA
aggacagacacaacggcaac

SEQ ID NO: 6462 - RNA, 20 nt, synthetic construct
  source 1..20: mol_type = other RNA
aaggacagacacaacggcaa

SEQ ID NO: 6463 - RNA, 20 nt, synthetic construct
  source 1..20: mol_type = other RNA
caaggacagacacaacggca

SEQ ID NO: 6464 - RNA, 20 nt, synthetic construct
  source 1..20: mol_type = other RNA
tcaaggacagacacaacggc

SEQ ID NO: 6465 - RNA, 20 nt, synthetic construct
  source 1..20: mol_type = other RNA
atcaaggacagacacaacgg

SEQ ID NO: 6466 - RNA, 20 nt, synthetic construct
  source 1..20: mol_type = other RNA
cggcaacattatgctggaca

SEQ ID NO: 6467 - RNA, 20 nt, synthetic construct
  source 1..20: mol_type = other RNA
gcaacattatgctggacaag

SEQ ID NO: 6468 - RNA, 20 nt, synthetic construct
  source 1..20: mol_type = other RNA
ggcaacattatgctggacaa

SEQ ID NO: 6469 - RNA, 20 nt, synthetic construct
  source 1..20: mol_type = other RNA
acggcaacattatgctggac

SEQ ID NO: 6470 - RNA, 20 nt, synthetic construct
  source 1..20: mol_type = other RNA
aacggcaacattatgctgga

SEQ ID NO: 6471 - RNA, 20 nt, synthetic construct
  source 1..20: mol_type = other RNA
caacggcaacattatgctgg

SEQ ID NO: 6472 - RNA, 20 nt, synthetic construct
  source 1..20: mol_type = other RNA
tcaaggtgggagacgactgc

SEQ ID NO: 6473 - RNA, 20 nt, synthetic construct
  source 1..20: mol_type = other RNA
tcttcaaggtgggagacgac

SEQ ID NO: 6474 - RNA, 20 nt, synthetic construct
  source 1..20: mol_type = other RNA
ttcaaggtgggagacgactg

SEQ ID NO: 6475 - RNA, 20 nt, synthetic construct
  source 1..20: mol_type = other RNA
cttcaaggtgggagacgact

SEQ ID NO: 6476 - RNA, 20 nt, synthetic construct
  source 1..20: mol_type = other RNA
atcttcaaggtgggagacga

SEQ ID NO: 6477 - RNA, 20 nt, synthetic construct
  source 1..20: mol_type = other RNA
catcttcaaggtgggagacg

SEQ ID NO: 6478 - RNA, 20 nt, synthetic construct
  source 1..20: mol_type = other RNA
tcgactttggcttcatcctc

SEQ ID NO: 6479 - RNA, 20 nt, synthetic construct
  source 1..20: mol_type = other RNA
atcgactttggcttcatcct

SEQ ID NO: 6480 - RNA, 20 nt, synthetic construct
  source 1..20: mol_type = other RNA
catcgactttggcttcatcc

SEQ ID NO: 6481 - RNA, 20 nt, synthetic construct
  source 1..20: mol_type = other RNA
acatcgactttggcttcatc

SEQ ID NO: 6482 - RNA, 20 nt, synthetic construct
  source 1..20: mol_type = other RNA
cacatcgactttggcttcat

SEQ ID NO: 6483 - RNA, 20 nt, synthetic construct
  source 1..20: mol_type = other RNA
aaggacaggtaggtgacttc

SEQ ID NO: 6484 - RNA, 20 nt, synthetic construct
  source 1..20: mol_type = other RNA
aggacaggtaggtgacttct

SEQ ID NO: 6485 - RNA, 20 nt, synthetic construct
  source 1..20: mol_type = other RNA
caaggacaggtaggtgactt

SEQ ID NO: 6486 - RNA, 20 nt, synthetic construct
  source 1..20: mol_type = other RNA
tcaaggacaggtaggtgact

SEQ ID NO: 6487 - RNA, 20 nt, synthetic construct
  source 1..20: mol_type = other RNA
gtcaaggacaggtaggtgac

SEQ ID NO: 6488 - RNA, 20 nt, synthetic construct
  source 1..20: mol_type = other RNA
tcaagtgtggggatgacctt

SEQ ID NO: 6489 - RNA, 20 nt, synthetic construct
  source 1..20: mol_type = other RNA
gtcaagtgtggggatgacct

SEQ ID NO: 6490 - RNA, 20 nt, synthetic construct
  source 1..20: mol_type = other RNA
tgtcaagtgtggggatgacc

SEQ ID NO: 6491 - RNA, 20 nt, synthetic construct
  source 1..20: mol_type = other RNA
ttgtcaagtgtggggatgac

SEQ ID NO: 6492 - RNA, 20 nt, synthetic construct
  source 1..20: mol_type = other RNA
attgtcaagtgtggggatga

SEQ ID NO: 6493 - RNA, 20 nt, synthetic construct
  source 1..20: mol_type = other RNA
cattgtcaagtgtggggatg

SEQ ID NO: 6494 - RNA, 20 nt, synthetic construct
  source 1..20: mol_type = other RNA
acattgactttggaaagttt

SEQ ID NO: 6495 - RNA, 20 nt, synthetic construct
  source 1..20: mol_type = other RNA
cacattgactttggaaagtt

SEQ ID NO: 6496 - RNA, 20 nt, synthetic construct
  source 1..20: mol_type = other RNA
gtgatcgacacaatgacaat

SEQ ID NO: 6497 - RNA, 20 nt, synthetic construct
  source 1..20: mol_type = other RNA
tgtgatcgacacaatgacaa

SEQ ID NO: 6498 - RNA, 20 nt, synthetic construct
  source 1..20: mol_type = other RNA
ctgtgatcgacacaatgaca

SEQ ID NO: 6499 - RNA, 20 nt, synthetic construct
  source 1..20: mol_type = other RNA
tctgtgatcgacacaatgac

SEQ ID NO: 6500 - RNA, 20 nt, synthetic construct
  source 1..20: mol_type = other RNA
atctgtgatcgacacaatga

SEQ ID NO: 6501 - RNA, 20 nt, synthetic construct
  source 1..20: mol_type = other RNA
atgacaatataatgcttcga

SEQ ID NO: 6502 - RNA, 20 nt, synthetic construct
  source 1..20: mol_type = other RNA
acaatataatgcttcgaagc

SEQ ID NO: 6503 - RNA, 20 nt, synthetic construct
  source 1..20: mol_type = other RNA
gacaatataatgcttcgaag

SEQ ID NO: 6504 - RNA, 20 nt, synthetic construct
  source 1..20: mol_type = other RNA
tgacaatataatgcttcgaa

SEQ ID NO: 6505 - RNA, 20 nt, synthetic construct
  source 1..20: mol_type = other RNA
aatgacaatataatgcttcg

SEQ ID NO: 6506 - RNA, 20 nt, synthetic construct
  source 1..20: mol_type = other RNA
caatgacaatataatgcttc

SEQ ID NO: 6507 - RNA, 20 nt, synthetic construct
  source 1..20: mol_type = other RNA
tgtttaaggtgagtaaataa

SEQ ID NO: 6508 - RNA, 20 nt, synthetic construct
  source 1..20: mol_type = other RNA
ttaaggtgagtaaataatgt

SEQ ID NO: 6509 - RNA, 20 nt, synthetic construct
  source 1..20: mol_type = other RNA
tttaaggtgagtaaataatg

SEQ ID NO: 6510 - RNA, 20 nt, synthetic construct
  source 1..20: mol_type = other RNA
gtttaaggtgagtaaataat

SEQ ID NO: 6511 - RNA, 20 nt, synthetic construct
  source 1..20: mol_type = other RNA
atgtttaaggtgagtaaata

SEQ ID NO: 6512 - RNA, 20 nt, synthetic construct
  source 1..20: mol_type = other RNA
catgtttaaggtgagtaaat

SEQ ID NO: 6513 - RNA, 20 nt, synthetic construct
  source 1..20: mol_type = other RNA
gtgaccgacataatgacaac

SEQ ID NO: 6514 - RNA, 20 nt, synthetic construct
  source 1..20: mol_type = other RNA
tgtgaccgacataatgacaa

SEQ ID NO: 6515 - RNA, 20 nt, synthetic construct
  source 1..20: mol_type = other RNA
ctgtgaccgacataatgaca

SEQ ID NO: 6516 - RNA, 20 nt, synthetic construct
  source 1..20: mol_type = other RNA
tctgtgaccgacataatgac

SEQ ID NO: 6517 - RNA, 20 nt, synthetic construct
  source 1..20: mol_type = other RNA
atctgtgaccgacataatga

SEQ ID NO: 6518 - RNA, 20 nt, synthetic construct
  source 1..20: mol_type = other RNA
taatgacaacatcatgctga

SEQ ID NO: 6519 - RNA, 20 nt, synthetic construct
  source 1..20: mol_type = other RNA
acaacatcatgctgaagacc

SEQ ID NO: 6520 - RNA, 20 nt, synthetic construct
  source 1..20: mol_type = other RNA
gacaacatcatgctgaagac

SEQ ID NO: 6521 - RNA, 20 nt, synthetic construct
  source 1..20: mol_type = other RNA
tgacaacatcatgctgaaga

SEQ ID NO: 6522 - RNA, 20 nt, synthetic construct
  source 1..20: mol_type = other RNA
atgacaacatcatgctgaag

SEQ ID NO: 6523 - RNA, 20 nt, synthetic construct
  source 1..20: mol_type = other RNA
aatgacaacatcatgctgaa

SEQ ID NO: 6524 - RNA, 20 nt, synthetic construct
  source 1..20: mol_type = other RNA
tcaaggtgagaatactttac

SEQ ID NO: 6525 - RNA, 20 nt, synthetic construct
  source 1..20: mol_type = other RNA
ttcaaggtgagaatacttta

SEQ ID NO: 6526 - RNA, 20 nt, synthetic construct
  source 1..20: mol_type = other RNA
cttcaaggtgagaatacttt

SEQ ID NO: 6527 - RNA, 20 nt, synthetic construct
  source 1..20: mol_type = other RNA
tcttcaaggtgagaatactt

SEQ ID NO: 6528 - RNA, 20 nt, synthetic construct
  source 1..20: mol_type = other RNA
atcttcaaggtgagaatact

SEQ ID NO: 6529 - RNA, 20 nt, synthetic construct
  source 1..20: mol_type = other RNA
catcttcaaggtgagaatac

SEQ ID NO: 6530 - RNA, 20 nt, synthetic construct
  source 1..20: mol_type = other RNA
attgactttggaaaattctt

SEQ ID NO: 6531 - RNA, 20 nt, synthetic construct
  source 1..20: mol_type = other RNA
ttgactttggaaaattctta

SEQ ID NO: 6532 - RNA, 20 nt, synthetic construct
  source 1..20: mol_type = other RNA
catattgactttggaaaatt

SEQ ID NO: 6533 - RNA, 20 nt, synthetic construct
  source 1..20: mol_type = other RNA
atattgactttggaaaattc

SEQ ID NO: 6534 - RNA, 20 nt, synthetic construct
  source 1..20: mol_type = other RNA
tattgactttggaaaattct

SEQ ID NO: 6535 - RNA, 20 nt, synthetic construct
  source 1..20: mol_type = other RNA
gtatgtgaccgtcacaatga

SEQ ID NO: 6536 - RNA, 20 nt, synthetic construct
  source 1..20: mol_type = other RNA
tatgtgaccgtcacaatgat

SEQ ID NO: 6537 - RNA, 20 nt, synthetic construct
  source 1..20: mol_type = other RNA
atgtgaccgtcacaatgata

SEQ ID NO: 6538 - RNA, 20 nt, synthetic construct
  source 1..20: mol_type = other RNA
tgtgaccgtcacaatgataa

SEQ ID NO: 6539 - RNA, 20 nt, synthetic construct
  source 1..20: mol_type = other RNA
gtgaccgtcacaatgataat

SEQ ID NO: 6540 - RNA, 20 nt, synthetic construct
  source 1..20: mol_type = other RNA
tgataatatcatgctgacaa

SEQ ID NO: 6541 - RNA, 20 nt, synthetic construct
  source 1..20: mol_type = other RNA
caatgataatatcatgctga

SEQ ID NO: 6542 - RNA, 20 nt, synthetic construct
  source 1..20: mol_type = other RNA
aatgataatatcatgctgac

SEQ ID NO: 6543 - RNA, 20 nt, synthetic construct
  source 1..20: mol_type = other RNA
atgataatatcatgctgaca

SEQ ID NO: 6544 - RNA, 20 nt, synthetic construct
  source 1..20: mol_type = other RNA
gataatatcatgctgacaaa

SEQ ID NO: 6545 - RNA, 20 nt, synthetic construct
  source 1..20: mol_type = other RNA
ataatatcatgctgacaaag

SEQ ID NO: 6546 - RNA, 20 nt, synthetic construct
  source 1..20: mol_type = other RNA
tttaaggtatggtagcgctc

SEQ ID NO: 6547 - RNA, 20 nt, synthetic construct
  source 1..20: mol_type = other RNA
ttaaggtatggtagcgctct

SEQ ID NO: 6548 - RNA, 20 nt, synthetic construct
  source 1..20: mol_type = other RNA
catagactttggatatattt

SEQ ID NO: 6549 - RNA, 20 nt, synthetic construct
  source 1..20: mol_type = other RNA
cacatagactttggatatat

SEQ ID NO: 6550 - RNA, 20 nt, synthetic construct
  source 1..20: mol_type = other RNA
acatagactttggatatatt

SEQ ID NO: 6551 - RNA, 20 nt, synthetic construct
  source 1..20: mol_type = other RNA
gttggagacaggcacctgga

SEQ ID NO: 6552 - RNA, 20 nt, synthetic construct
  source 1..20: mol_type = other RNA
ttggagacaggcacctggat

SEQ ID NO: 6553 - RNA, 20 nt, synthetic construct
  source 1..20: mol_type = other RNA
tggagacaggcacctggata

SEQ ID NO: 6554 - RNA, 20 nt, synthetic construct
  source 1..20: mol_type = other RNA
ggagacaggcacctggataa

SEQ ID NO: 6555 - RNA, 20 nt, synthetic construct
  source 1..20: mol_type = other RNA
gagacaggcacctggataac

SEQ ID NO: 6556 - RNA, 20 nt, synthetic construct
  source 1..20: mol_type = other RNA
ttaagcatggagatgattta

SEQ ID NO: 6557 - RNA, 20 nt, synthetic construct
  source 1..20: mol_type = other RNA
tatatttaagcatggagatg

SEQ ID NO: 6558 - RNA, 20 nt, synthetic construct
  source 1..20: mol_type = other RNA
atatttaagcatggagatga

SEQ ID NO: 6559 - RNA, 20 nt, synthetic construct
  source 1..20: mol_type = other RNA
tatttaagcatggagatgat

SEQ ID NO: 6560 - RNA, 20 nt, synthetic construct
  source 1..20: mol_type = other RNA
atttaagcatggagatgatt

SEQ ID NO: 6561 - RNA, 20 nt, synthetic construct
  source 1..20: mol_type = other RNA
tttaagcatggagatgattt

SEQ ID NO: 6562 - RNA, 20 nt, synthetic construct
  source 1..20: mol_type = other RNA
attggagatcgtcacaatag

SEQ ID NO: 6563 - RNA, 20 nt, synthetic construct
  source 1..20: mol_type = other RNA
ttggagatcgtcacaatagt

SEQ ID NO: 6564 - RNA, 20 nt, synthetic construct
  source 1..20: mol_type = other RNA
tggagatcgtcacaatagta

SEQ ID NO: 6565 - RNA, 20 nt, synthetic construct
  source 1..20: mol_type = other RNA
ggagatcgtcacaatagtaa

SEQ ID NO: 6566 - RNA, 20 nt, synthetic construct
  source 1..20: mol_type = other RNA
gagatcgtcacaatagtaac

SEQ ID NO: 6567 - RNA, 20 nt, synthetic construct
  source 1..20: mol_type = other RNA
aatagtaacatcatggtgaa

SEQ ID NO: 6568 - RNA, 20 nt, synthetic construct
  source 1..20: mol_type = other RNA
agtaacatcatggtgaaaga

SEQ ID NO: 6569 - RNA, 20 nt, synthetic construct
  source 1..20: mol_type = other RNA
caatagtaacatcatggtga

SEQ ID NO: 6570 - RNA, 20 nt, synthetic construct
  source 1..20: mol_type = other RNA
atagtaacatcatggtgaaa

SEQ ID NO: 6571 - RNA, 20 nt, synthetic construct
  source 1..20: mol_type = other RNA
tagtaacatcatggtgaaag

SEQ ID NO: 6572 - RNA, 20 nt, synthetic construct
  source 1..20: mol_type = other RNA
gtaacatcatggtgaaagac

SEQ ID NO: 6573 - RNA, 20 nt, synthetic construct
  source 1..20: mol_type = other RNA
ttgactttggacatattctt

SEQ ID NO: 6574 - RNA, 20 nt, synthetic construct
  source 1..20: mol_type = other RNA
attgactttggacatattct

SEQ ID NO: 6575 - RNA, 20 nt, synthetic construct
  source 1..20: mol_type = other RNA
cattgactttggacatattc

SEQ ID NO: 6576 - RNA, 20 nt, synthetic construct
  source 1..20: mol_type = other RNA
acattgactttggacatatt

SEQ ID NO: 6577 - RNA, 20 nt, synthetic construct
  source 1..20: mol_type = other RNA
cacattgactttggacatat

SEQ ID NO: 6578 - RNA, 20 nt, synthetic construct
  source 1..20: mol_type = other RNA
gtgacagacatagtgacaac

SEQ ID NO: 6579 - RNA, 20 nt, synthetic construct
  source 1..20: mol_type = other RNA
ggtgacagacatagtgacaa

SEQ ID NO: 6580 - RNA, 20 nt, synthetic construct
  source 1..20: mol_type = other RNA
tggtgacagacatagtgaca

SEQ ID NO: 6581 - RNA, 20 nt, synthetic construct
  source 1..20: mol_type = other RNA
ttggtgacagacatagtgac

SEQ ID NO: 6582 - RNA, 20 nt, synthetic construct
  source 1..20: mol_type = other RNA
attggtgacagacatagtga

SEQ ID NO: 6583 - RNA, 20 nt, synthetic construct
  source 1..20: mol_type = other RNA
tgacaacatcatggtcaaaa

SEQ ID NO: 6584 - RNA, 20 nt, synthetic construct
  source 1..20: mol_type = other RNA
gtgacaacatcatggtcaaa

SEQ ID NO: 6585 - RNA, 20 nt, synthetic construct
  source 1..20: mol_type = other RNA
agtgacaacatcatggtcaa

SEQ ID NO: 6586 - RNA, 20 nt, synthetic construct
  source 1..20: mol_type = other RNA
tagtgacaacatcatggtca

SEQ ID NO: 6587 - RNA, 20 nt, synthetic construct
  source 1..20: mol_type = other RNA
attggcgatcggcacagcga

SEQ ID NO: 6588 - RNA, 20 nt, synthetic construct
  source 1..20: mol_type = other RNA
ttggcgatcggcacagcgac

SEQ ID NO: 6589 - RNA, 20 nt, synthetic construct
  source 1..20: mol_type = other RNA
tggcgatcggcacagcgaca

SEQ ID NO: 6590 - RNA, 20 nt, synthetic construct
  source 1..20: mol_type = other RNA
ggcgatcggcacagcgacaa

SEQ ID NO: 6591 - RNA, 20 nt, synthetic construct
  source 1..20: mol_type = other RNA
gcgatcggcacagcgacaac

SEQ ID NO: 6592 - RNA, 20 nt, synthetic construct
  source 1..20: mol_type = other RNA
agcgacaacatcatgatccg

SEQ ID NO: 6593 - RNA, 20 nt, synthetic construct
  source 1..20: mol_type = other RNA
cgacaacatcatgatccgag

SEQ ID NO: 6594 - RNA, 20 nt, synthetic construct
  source 1..20: mol_type = other RNA
acaacatcatgatccgagag

SEQ ID NO: 6595 - RNA, 20 nt, synthetic construct
  source 1..20: mol_type = other RNA
cagcgacaacatcatgatcc

SEQ ID NO: 6596 - RNA, 20 nt, synthetic construct
  source 1..20: mol_type = other RNA
gcgacaacatcatgatccga

SEQ ID NO: 6597 - RNA, 20 nt, synthetic construct
  source 1..20: mol_type = other RNA
gacaacatcatgatccgaga

SEQ ID NO: 6598 - RNA, 20 nt, synthetic construct
  source 1..20: mol_type = other RNA
atctttaagaacggggatgg

SEQ ID NO: 6599 - RNA, 20 nt, synthetic construct
  source 1..20: mol_type = other RNA
ctttaagaacggggatggtg

SEQ ID NO: 6600 - RNA, 20 nt, synthetic construct
  source 1..20: mol_type = other RNA
tttaagaacggggatggtga

SEQ ID NO: 6601 - RNA, 20 nt, synthetic construct
  source 1..20: mol_type = other RNA
ttaagaacggggatggtgag

SEQ ID NO: 6602 - RNA, 20 nt, synthetic construct
  source 1..20: mol_type = other RNA
catctttaagaacggggatg

SEQ ID NO: 6603 - RNA, 20 nt, synthetic construct
  source 1..20: mol_type = other RNA
tctttaagaacggggatggt

SEQ ID NO: 6604 - RNA, 20 nt, synthetic construct
  source 1..20: mol_type = other RNA
attgacttcgggcacattct

SEQ ID NO: 6605 - RNA, 20 nt, synthetic construct
  source 1..20: mol_type = other RNA
ttgacttcgggcacattctt

SEQ ID NO: 6606 - RNA, 20 nt, synthetic construct
  source 1..20: mol_type = other RNA
catattgacttcgggcacat

SEQ ID NO: 6607 - RNA, 20 nt, synthetic construct
  source 1..20: mol_type = other RNA
atattgacttcgggcacatt

SEQ ID NO: 6608 - RNA, 20 nt, synthetic construct
  source 1..20: mol_type = other RNA
tattgacttcgggcacattc

SEQ ID NO: 6609 - RNA, 20 nt, synthetic construct
  source 1..20: mol_type = other RNA
ataggcgacagacacaatga

SEQ ID NO: 6610 - RNA, 20 nt, synthetic construct
  source 1..20: mol_type = other RNA
taggcgacagacacaatgac

SEQ ID NO: 6611 - RNA, 20 nt, synthetic construct
  source 1..20: mol_type = other RNA
aggcgacagacacaatgaca

SEQ ID NO: 6612 - RNA, 20 nt, synthetic construct
  source 1..20: mol_type = other RNA
ggcgacagacacaatgacaa

SEQ ID NO: 6613 - RNA, 20 nt, synthetic construct
  source 1..20: mol_type = other RNA
gcgacagacacaatgacaat

SEQ ID NO: 6614 - RNA, 20 nt, synthetic construct
  source 1..20: mol_type = other RNA
aatgacaatattatgatcac

SEQ ID NO: 6615 - RNA, 20 nt, synthetic construct
  source 1..20: mol_type = other RNA
tgacaatattatgatcaccg

SEQ ID NO: 6616 - RNA, 20 nt, synthetic construct
  source 1..20: mol_type = other RNA
caatgacaatattatgatca

SEQ ID NO: 6617 - RNA, 20 nt, synthetic construct
  source 1..20: mol_type = other RNA
atgacaatattatgatcacc

SEQ ID NO: 6618 - RNA, 20 nt, synthetic construct
  source 1..20: mol_type = other RNA
gacaatattatgatcaccga

SEQ ID NO: 6619 - RNA, 20 nt, synthetic construct
  source 1..20: mol_type = other RNA
acaatattatgatcaccgag

SEQ ID NO: 6620 - RNA, 20 nt, synthetic construct
  source 1..20: mol_type = other RNA
ctttaaacatggtgatgatc

SEQ ID NO: 6621 - RNA, 20 nt, synthetic construct
  source 1..20: mol_type = other RNA
ttaaacatggtgatgatctg

SEQ ID NO: 6622 - RNA, 20 nt, synthetic construct
  source 1..20: mol_type = other RNA
tatctttaaacatggtgatg

SEQ ID NO: 6623 - RNA, 20 nt, synthetic construct
  source 1..20: mol_type = other RNA
atctttaaacatggtgatga

SEQ ID NO: 6624 - RNA, 20 nt, synthetic construct
  source 1..20: mol_type = other RNA
tctttaaacatggtgatgat

SEQ ID NO: 6625 - RNA, 20 nt, synthetic construct
  source 1..20: mol_type = other RNA
tttaaacatggtgatgatct

SEQ ID NO: 6626 - RNA, 20 nt, synthetic construct
  source 1..20: mol_type = other RNA
taaacatggtgatgatctgc

SEQ ID NO: 6627 - RNA, 20 nt, synthetic construct
  source 1..20: mol_type = other RNA
ggggacatcaagactgagaa

SEQ ID NO: 6628 - RNA, 20 nt, synthetic construct
  source 1..20: mol_type = other RNA
gggacatcaagactgagaat

SEQ ID NO: 6629 - RNA, 20 nt, synthetic construct
  source 1..20: mol_type = other RNA
tggggacatcaagactgaga

SEQ ID NO: 6630 - RNA, 20 nt, synthetic construct
  source 1..20: mol_type = other RNA
atggggacatcaagactgag

SEQ ID NO: 6631 - RNA, 20 nt, synthetic construct
  source 1..20: mol_type = other RNA
catggggacatcaagactga

SEQ ID NO: 6632 - RNA, 20 nt, synthetic construct
  source 1..20: mol_type = other RNA
agaatgtgatggtcaccagt

SEQ ID NO: 6633 - RNA, 20 nt, synthetic construct
  source 1..20: mol_type = other RNA
ctgagaatgtgatggtcacc

SEQ ID NO: 6634 - RNA, 20 nt, synthetic construct
  source 1..20: mol_type = other RNA
gagaatgtgatggtcaccag

SEQ ID NO: 6635 - RNA, 20 nt, synthetic construct
  source 1..20: mol_type = other RNA
tgagaatgtgatggtcacca

SEQ ID NO: 6636 - RNA, 20 nt, synthetic construct
  source 1..20: mol_type = other RNA
actgagaatgtgatggtcac

SEQ ID NO: 6637 - RNA, 20 nt, synthetic construct
  source 1..20: mol_type = other RNA
gactgagaatgtgatggtca

SEQ ID NO: 6638 - RNA, 20 nt, synthetic construct
  source 1..20: mol_type = other RNA
ccccagattatattcgaaca

SEQ ID NO: 6639 - RNA, 20 nt, synthetic construct
  source 1..20: mol_type = other RNA
cccagattatattcgaacat

SEQ ID NO: 6640 - RNA, 20 nt, synthetic construct
  source 1..20: mol_type = other RNA
ccagattatattcgaacatt

SEQ ID NO: 6641 - RNA, 20 nt, synthetic construct
  source 1..20: mol_type = other RNA
cagattatattcgaacattt

SEQ ID NO: 6642 - RNA, 20 nt, synthetic construct
  source 1..20: mol_type = other RNA
attatagattattctttgct

SEQ ID NO: 6643 - RNA, 20 nt, synthetic construct
  source 1..20: mol_type = other RNA
atagattattctttgctggt

SEQ ID NO: 6644 - RNA, 20 nt, synthetic construct
  source 1..20: mol_type = other RNA
tagattattctttgctggtt

SEQ ID NO: 6645 - RNA, 20 nt, synthetic construct
  source 1..20: mol_type = other RNA
ttatagattattctttgctg

SEQ ID NO: 6646 - RNA, 20 nt, synthetic construct
  source 1..20: mol_type = other RNA
tatagattattctttgctgg

SEQ ID NO: 6647 - RNA, 20 nt, synthetic construct
  source 1..20: mol_type = other RNA
tttgaagcaaatgcctcgtc

SEQ ID NO: 6648 - RNA, 20 nt, synthetic construct
  source 1..20: mol_type = other RNA
ttgaagcaaatgcctcgtct

SEQ ID NO: 6649 - RNA, 20 nt, synthetic construct
  source 1..20: mol_type = other RNA
tgaagcaaatgcctcgtctg

SEQ ID NO: 6650 - RNA, 20 nt, synthetic construct
  source 1..20: mol_type = other RNA
ctcatcgacttcgggtcggg

SEQ ID NO: 6651 - RNA, 20 nt, synthetic construct
  source 1..20: mol_type = other RNA
tcatcgacttcgggtcgggg

SEQ ID NO: 6652 - RNA, 20 nt, synthetic construct
  source 1..20: mol_type = other RNA
caccgcgacatcaaggacga

SEQ ID NO: 6653 - RNA, 20 nt, synthetic construct
  source 1..20: mol_type = other RNA
accgcgacatcaaggacgaa

SEQ ID NO: 6654 - RNA, 20 nt, synthetic construct
  source 1..20: mol_type = other RNA
ccgcgacatcaaggacgaaa

SEQ ID NO: 6655 - RNA, 20 nt, synthetic construct
  source 1..20: mol_type = other RNA
cgcgacatcaaggacgaaaa

SEQ ID NO: 6656 - RNA, 20 nt, synthetic construct
  source 1..20: mol_type = other RNA
gcgacatcaaggacgaaaac

SEQ ID NO: 6657 - RNA, 20 nt, synthetic construct
  source 1..20: mol_type = other RNA
ggacgaaaacatccttatcg

SEQ ID NO: 6658 - RNA, 20 nt, synthetic construct
  source 1..20: mol_type = other RNA
gacgaaaacatccttatcga

SEQ ID NO: 6659 - RNA, 20 nt, synthetic construct
  source 1..20: mol_type = other RNA
acgaaaacatccttatcgac

SEQ ID NO: 6660 - RNA, 20 nt, synthetic construct
  source 1..20: mol_type = other RNA
cgaaaacatccttatcgacc

SEQ ID NO: 6661 - RNA, 20 nt, synthetic construct
  source 1..20: mol_type = other RNA
gaaaacatccttatcgacct

SEQ ID NO: 6662 - RNA, 20 nt, synthetic construct
  source 1..20: mol_type = other RNA
aaaacatccttatcgacctc

SEQ ID NO: 6663 - RNA, 20 nt, synthetic construct
  source 1..20: mol_type = other RNA
ggccatcaaacacgtggaga

SEQ ID NO: 6664 - RNA, 20 nt, synthetic construct
  source 1..20: mol_type = other RNA
gccatcaaacacgtggagaa

SEQ ID NO: 6665 - RNA, 20 nt, synthetic construct
  source 1..20: mol_type = other RNA
tcaaacacgtggagaaggac

SEQ ID NO: 6666 - RNA, 20 nt, synthetic construct
  source 1..20: mol_type = other RNA
caaacacgtggagaaggacc

SEQ ID NO: 6667 - RNA, 20 nt, synthetic construct
  source 1..20: mol_type = other RNA
ccatcaaacacgtggagaag

SEQ ID NO: 6668 - RNA, 20 nt, synthetic construct
  source 1..20: mol_type = other RNA
catcaaacacgtggagaagg

SEQ ID NO: 6669 - RNA, 20 nt, synthetic construct
  source 1..20: mol_type = other RNA
atcaaacacgtggagaagga

SEQ ID NO: 6670 - RNA, 20 nt, synthetic construct
  source 1..20: mol_type = other RNA
tcgtgacatcaaggatgaga

SEQ ID NO: 6671 - RNA, 20 nt, synthetic construct
  source 1..20: mol_type = other RNA
atcgtgacatcaaggatgag

SEQ ID NO: 6672 - RNA, 20 nt, synthetic construct
  source 1..20: mol_type = other RNA
catcgtgacatcaaggatga

SEQ ID NO: 6673 - RNA, 20 nt, synthetic construct
  source 1..20: mol_type = other RNA
agaacatcctgatagaccta

SEQ ID NO: 6674 - RNA, 20 nt, synthetic construct
  source 1..20: mol_type = other RNA
gagaacatcctgatagacct

SEQ ID NO: 6675 - RNA, 20 nt, synthetic construct
  source 1..20: mol_type = other RNA
tgagaacatcctgatagacc

SEQ ID NO: 6676 - RNA, 20 nt, synthetic construct
  source 1..20: mol_type = other RNA
atgagaacatcctgatagac

SEQ ID NO: 6677 - RNA, 20 nt, synthetic construct
  source 1..20: mol_type = other RNA
gatgagaacatcctgataga

SEQ ID NO: 6678 - RNA, 20 nt, synthetic construct
  source 1..20: mol_type = other RNA
ggatgagaacatcctgatag

SEQ ID NO: 6679 - RNA, 20 nt, synthetic construct
  source 1..20: mol_type = other RNA
tcaaagtgattccccggaat

SEQ ID NO: 6680 - RNA, 20 nt, synthetic construct
  source 1..20: mol_type = other RNA
ggccatcaaagtgattcccc

SEQ ID NO: 6681 - RNA, 20 nt, synthetic construct
  source 1..20: mol_type = other RNA
caaagtgattccccggaatc

SEQ ID NO: 6682 - RNA, 20 nt, synthetic construct
  source 1..20: mol_type = other RNA
atcaaagtgattccccggaa

SEQ ID NO: 6683 - RNA, 20 nt, synthetic construct
  source 1..20: mol_type = other RNA
catcaaagtgattccccgga

SEQ ID NO: 6684 - RNA, 20 nt, synthetic construct
  source 1..20: mol_type = other RNA
ccatcaaagtgattccccgg

SEQ ID NO: 6685 - RNA, 20 nt, synthetic construct
  source 1..20: mol_type = other RNA
gccatcaaagtgattccccg

SEQ ID NO: 6686 - RNA, 20 nt, synthetic construct
  source 1..20: mol_type = other RNA
ctcatcgacttcggttcggg

SEQ ID NO: 6687 - RNA, 20 nt, synthetic construct
  source 1..20: mol_type = other RNA
catcgacttcggttcgggtg

SEQ ID NO: 6688 - RNA, 20 nt, synthetic construct
  source 1..20: mol_type = other RNA
tcatcgacttcggttcgggt

SEQ ID NO: 6689 - RNA, 20 nt, synthetic construct
  source 1..20: mol_type = other RNA
atcgacttcggttcgggtgc

SEQ ID NO: 6690 - RNA, 20 nt, synthetic construct
  source 1..20: mol_type = other RNA
tcgacttcggttcgggtgcg

SEQ ID NO: 6691 - RNA, 20 nt, synthetic construct
  source 1..20: mol_type = other RNA
caccgcgacattaaggacga

SEQ ID NO: 6692 - RNA, 20 nt, synthetic construct
  source 1..20: mol_type = other RNA
accgcgacattaaggacgaa

SEQ ID NO: 6693 - RNA, 20 nt, synthetic construct
  source 1..20: mol_type = other RNA
ccgcgacattaaggacgaaa

SEQ ID NO: 6694 - RNA, 20 nt, synthetic construct
  source 1..20: mol_type = other RNA
cgcgacattaaggacgaaaa

SEQ ID NO: 6695 - RNA, 20 nt, synthetic construct
  source 1..20: mol_type = other RNA
gcgacattaaggacgaaaat

SEQ ID NO: 6696 - RNA, 20 nt, synthetic construct
  source 1..20: mol_type = other RNA
cgaaaatctgcttgtggacc

SEQ ID NO: 6697 - RNA, 20 nt, synthetic construct
  source 1..20: mol_type = other RNA
aaaatctgcttgtggacctg

SEQ ID NO: 6698 - RNA, 20 nt, synthetic construct
  source 1..20: mol_type = other RNA
ggacgaaaatctgcttgtgg

SEQ ID NO: 6699 - RNA, 20 nt, synthetic construct
  source 1..20: mol_type = other RNA
gacgaaaatctgcttgtgga

SEQ ID NO: 6700 - RNA, 20 nt, synthetic construct
  source 1..20: mol_type = other RNA
acgaaaatctgcttgtggac

SEQ ID NO: 6701 - RNA, 20 nt, synthetic construct
  source 1..20: mol_type = other RNA
gaaaatctgcttgtggacct

SEQ ID NO: 6702 - RNA, 20 nt, synthetic construct
  source 1..20: mol_type = other RNA
ggctgtgaagcacgtggtga

SEQ ID NO: 6703 - RNA, 20 nt, synthetic construct
  source 1..20: mol_type = other RNA
gctgtgaagcacgtggtgaa

SEQ ID NO: 6704 - RNA, 20 nt, synthetic construct
  source 1..20: mol_type = other RNA
tgtgaagcacgtggtgaagg

SEQ ID NO: 6705 - RNA, 20 nt, synthetic construct
  source 1..20: mol_type = other RNA
tgaagcacgtggtgaaggag

SEQ ID NO: 6706 - RNA, 20 nt, synthetic construct
  source 1..20: mol_type = other RNA
ctgtgaagcacgtggtgaag

SEQ ID NO: 6707 - RNA, 20 nt, synthetic construct
  source 1..20: mol_type = other RNA
gtgaagcacgtggtgaagga

SEQ ID NO: 6708 - RNA, 20 nt, synthetic construct
  source 1..20: mol_type = other RNA
cacagagacctgaaatccga

SEQ ID NO: 6709 - RNA, 20 nt, synthetic construct
  source 1..20: mol_type = other RNA
acagagacctgaaatccgac

SEQ ID NO: 6710 - RNA, 20 nt, synthetic construct
  source 1..20: mol_type = other RNA
cagagacctgaaatccgaca

SEQ ID NO: 6711 - RNA, 20 nt, synthetic construct
  source 1..20: mol_type = other RNA
agagacctgaaatccgacaa

SEQ ID NO: 6712 - RNA, 20 nt, synthetic construct
  source 1..20: mol_type = other RNA
gagacctgaaatccgacaac

SEQ ID NO: 6713 - RNA, 20 nt, synthetic construct
  source 1..20: mol_type = other RNA
atccgacaacatccttgtgg

SEQ ID NO: 6714 - RNA, 20 nt, synthetic construct
  source 1..20: mol_type = other RNA
cgacaacatccttgtggagc

SEQ ID NO: 6715 - RNA, 20 nt, synthetic construct
  source 1..20: mol_type = other RNA
gacaacatccttgtggagct

SEQ ID NO: 6716 - RNA, 20 nt, synthetic construct
  source 1..20: mol_type = other RNA
tccgacaacatccttgtgga

SEQ ID NO: 6717 - RNA, 20 nt, synthetic construct
  source 1..20: mol_type = other RNA
ccgacaacatccttgtggag

SEQ ID NO: 6718 - RNA, 20 nt, synthetic construct
  source 1..20: mol_type = other RNA
acaacatccttgtggagctg

SEQ ID NO: 6719 - RNA, 20 nt, synthetic construct
  source 1..20: mol_type = other RNA
ggccatcaagatgatgtgga

SEQ ID NO: 6720 - RNA, 20 nt, synthetic construct
  source 1..20: mol_type = other RNA
gccatcaagatgatgtggaa

SEQ ID NO: 6721 - RNA, 20 nt, synthetic construct
  source 1..20: mol_type = other RNA
ccatcaagatgatgtggaac

SEQ ID NO: 6722 - RNA, 20 nt, synthetic construct
  source 1..20: mol_type = other RNA
catcaagatgatgtggaaca

SEQ ID NO: 6723 - RNA, 20 nt, synthetic construct
  source 1..20: mol_type = other RNA
atcaagatgatgtggaacat

SEQ ID NO: 6724 - RNA, 20 nt, synthetic construct
  source 1..20: mol_type = other RNA
tcaagatgatgtggaacatc

SEQ ID NO: 6725 - RNA, 20 nt, synthetic construct
  source 1..20: mol_type = other RNA
attgacatccttactcatta

SEQ ID NO: 6726 - RNA, 20 nt, synthetic construct
  source 1..20: mol_type = other RNA
ttgacatccttactcattat

SEQ ID NO: 6727 - RNA, 20 nt, synthetic construct
  source 1..20: mol_type = other RNA
tattgacatccttactcatt

SEQ ID NO: 6728 - RNA, 20 nt, synthetic construct
  source 1..20: mol_type = other RNA
ttattgacatccttactcat

SEQ ID NO: 6729 - RNA, 20 nt, synthetic construct
  source 1..20: mol_type = other RNA
attattgacatccttactca

SEQ ID NO: 6730 - RNA, 20 nt, synthetic construct
  source 1..20: mol_type = other RNA
tggactacagtctgctggtg

SEQ ID NO: 6731 - RNA, 20 nt, synthetic construct
  source 1..20: mol_type = other RNA
atggactacagtctgctggt

SEQ ID NO: 6732 - RNA, 20 nt, synthetic construct
  source 1..20: mol_type = other RNA
catggactacagtctgctgg

SEQ ID NO: 6733 - RNA, 20 nt, synthetic construct
  source 1..20: mol_type = other RNA
ctcatggactacagtctgct

SEQ ID NO: 6734 - RNA, 20 nt, synthetic construct
  source 1..20: mol_type = other RNA
tcatggactacagtctgctg

SEQ ID NO: 6735 - RNA, 20 nt, synthetic construct
  source 1..20: mol_type = other RNA
atcaagactattaccagtga

SEQ ID NO: 6736 - RNA, 20 nt, synthetic construct
  source 1..20: mol_type = other RNA
atcatcaagactattaccag

SEQ ID NO: 6737 - RNA, 20 nt, synthetic construct
  source 1..20: mol_type = other RNA
tcaagactattaccagtgaa

SEQ ID NO: 6738 - RNA, 20 nt, synthetic construct
  source 1..20: mol_type = other RNA
catcaagactattaccagtg

SEQ ID NO: 6739 - RNA, 20 nt, synthetic construct
  source 1..20: mol_type = other RNA
tcatcaagactattaccagt

SEQ ID NO: 6740 - RNA, 20 nt, synthetic construct
  source 1..20: mol_type = other RNA
catcatcaagactattacca

SEQ ID NO: 6741 - RNA, 20 nt, synthetic construct
  source 1..20: mol_type = other RNA
attgatatcctcacgccata

SEQ ID NO: 6742 - RNA, 20 nt, synthetic construct
  source 1..20: mol_type = other RNA
ttgatatcctcacgccatac

SEQ ID NO: 6743 - RNA, 20 nt, synthetic construct
  source 1..20: mol_type = other RNA
cattgatatcctcacgccat

SEQ ID NO: 6744 - RNA, 20 nt, synthetic construct
  source 1..20: mol_type = other RNA
tcattgatatcctcacgcca

SEQ ID NO: 6745 - RNA, 20 nt, synthetic construct
  source 1..20: mol_type = other RNA
atcattgatatcctcacgcc

SEQ ID NO: 6746 - RNA, 20 nt, synthetic construct
  source 1..20: mol_type = other RNA
tggactacagcctgctggtg

SEQ ID NO: 6747 - RNA, 20 nt, synthetic construct
  source 1..20: mol_type = other RNA
atggactacagcctgctggt

SEQ ID NO: 6748 - RNA, 20 nt, synthetic construct
  source 1..20: mol_type = other RNA
catggactacagcctgctgg

SEQ ID NO: 6749 - RNA, 20 nt, synthetic construct
  source 1..20: mol_type = other RNA
tcatggactacagcctgctg

SEQ ID NO: 6750 - RNA, 20 nt, synthetic construct
  source 1..20: mol_type = other RNA
atcatggactacagcctgct

SEQ ID NO: 6751 - RNA, 20 nt, synthetic construct
  source 1..20: mol_type = other RNA
atcaagactgtgtccagcga

SEQ ID NO: 6752 - RNA, 20 nt, synthetic construct
  source 1..20: mol_type = other RNA
catcaagactgtgtccagcg

SEQ ID NO: 6753 - RNA, 20 nt, synthetic construct
  source 1..20: mol_type = other RNA
gtcatcaagactgtgtccag

SEQ ID NO: 6754 - RNA, 20 nt, synthetic construct
  source 1..20: mol_type = other RNA
tcaagactgtgtccagcgag

SEQ ID NO: 6755 - RNA, 20 nt, synthetic construct
  source 1..20: mol_type = other RNA
tcatcaagactgtgtccagc

SEQ ID NO: 6756 - RNA, 20 nt, synthetic construct
  source 1..20: mol_type = other RNA
tgtcatcaagactgtgtcca

SEQ ID NO: 6757 - RNA, 20 nt, synthetic construct
  source 1..20: mol_type = other RNA
attgatatccttacacagta

SEQ ID NO: 6758 - RNA, 20 nt, synthetic construct
  source 1..20: mol_type = other RNA
ctcattgatatccttacaca

SEQ ID NO: 6759 - RNA, 20 nt, synthetic construct
  source 1..20: mol_type = other RNA
tcattgatatccttacacag

SEQ ID NO: 6760 - RNA, 20 nt, synthetic construct
  source 1..20: mol_type = other RNA
cattgatatccttacacagt

SEQ ID NO: 6761 - RNA, 20 nt, synthetic construct
  source 1..20: mol_type = other RNA
ttgatatccttacacagtat

SEQ ID NO: 6762 - RNA, 20 nt, synthetic construct
  source 1..20: mol_type = other RNA
atggactacagccttctgct

SEQ ID NO: 6763 - RNA, 20 nt, synthetic construct
  source 1..20: mol_type = other RNA
tggactacagccttctgcta

SEQ ID NO: 6764 - RNA, 20 nt, synthetic construct
  source 1..20: mol_type = other RNA
atcatggactacagccttct

SEQ ID NO: 6765 - RNA, 20 nt, synthetic construct
  source 1..20: mol_type = other RNA
tcatggactacagccttctg

SEQ ID NO: 6766 - RNA, 20 nt, synthetic construct
  source 1..20: mol_type = other RNA
catggactacagccttctgc

SEQ ID NO: 6767 - RNA, 20 nt, synthetic construct
  source 1..20: mol_type = other RNA
gtcatcaaagaagtatccag

SEQ ID NO: 6768 - RNA, 20 nt, synthetic construct
  source 1..20: mol_type = other RNA
catcaaagaagtatccagtg

SEQ ID NO: 6769 - RNA, 20 nt, synthetic construct
  source 1..20: mol_type = other RNA
atcaaagaagtatccagtga

SEQ ID NO: 6770 - RNA, 20 nt, synthetic construct
  source 1..20: mol_type = other RNA
ggtcatcaaagaagtatcca

SEQ ID NO: 6771 - RNA, 20 nt, synthetic construct
  source 1..20: mol_type = other RNA
tcatcaaagaagtatccagt

SEQ ID NO: 6772 - RNA, 20 nt, synthetic construct
  source 1..20: mol_type = other RNA
tcaaagaagtatccagtgag

SEQ ID NO: 6773 - RNA, 20 nt, synthetic construct
  source 1..20: mol_type = other RNA
caaagaagtatccagtgagg

SEQ ID NO: 6774 - RNA, 20 nt, synthetic construct
  source 1..20: mol_type = other RNA
ttgacattctacagtcttac

SEQ ID NO: 6775 - RNA, 20 nt, synthetic construct
  source 1..20: mol_type = other RNA
atcattgacattctacagtc

SEQ ID NO: 6776 - RNA, 20 nt, synthetic construct
  source 1..20: mol_type = other RNA
tcattgacattctacagtct

SEQ ID NO: 6777 - RNA, 20 nt, synthetic construct
  source 1..20: mol_type = other RNA
cattgacattctacagtctt

SEQ ID NO: 6778 - RNA, 20 nt, synthetic construct
  source 1..20: mol_type = other RNA
attgacattctacagtctta

SEQ ID NO: 6779 - RNA, 20 nt, synthetic construct
  source 1..20: mol_type = other RNA
aatggattacagcctcttga

SEQ ID NO: 6780 - RNA, 20 nt, synthetic construct
  source 1..20: mol_type = other RNA
ataatggattacagcctctt

SEQ ID NO: 6781 - RNA, 20 nt, synthetic construct
  source 1..20: mol_type = other RNA
taatggattacagcctcttg

SEQ ID NO: 6782 - RNA, 20 nt, synthetic construct
  source 1..20: mol_type = other RNA
atggattacagcctcttgat

SEQ ID NO: 6783 - RNA, 20 nt, synthetic construct
  source 1..20: mol_type = other RNA
tggattacagcctcttgatg

SEQ ID NO: 6784 - RNA, 20 nt, synthetic construct
  source 1..20: mol_type = other RNA
attaagacagtccaacataa

SEQ ID NO: 6785 - RNA, 20 nt, synthetic construct
  source 1..20: mol_type = other RNA
cattattaagacagtccaac

SEQ ID NO: 6786 - RNA, 20 nt, synthetic construct
  source 1..20: mol_type = other RNA
attattaagacagtccaaca

SEQ ID NO: 6787 - RNA, 20 nt, synthetic construct
  source 1..20: mol_type = other RNA
ttattaagacagtccaacat

SEQ ID NO: 6788 - RNA, 20 nt, synthetic construct
  source 1..20: mol_type = other RNA
tattaagacagtccaacata

SEQ ID NO: 6789 - RNA, 20 nt, synthetic construct
  source 1..20: mol_type = other RNA
ttaagacagtccaacataaa

SEQ ID NO: 6790 - RNA, 20 nt, synthetic construct
  source 1..20: mol_type = other RNA
ttgacattctgcaatcatat

SEQ ID NO: 6791 - RNA, 20 nt, synthetic construct
  source 1..20: mol_type = other RNA
attattgacattctgcaatc

SEQ ID NO: 6792 - RNA, 20 nt, synthetic construct
  source 1..20: mol_type = other RNA
ttattgacattctgcaatca

SEQ ID NO: 6793 - RNA, 20 nt, synthetic construct
  source 1..20: mol_type = other RNA
tattgacattctgcaatcat

SEQ ID NO: 6794 - RNA, 20 nt, synthetic construct
  source 1..20: mol_type = other RNA
attgacattctgcaatcata

SEQ ID NO: 6795 - RNA, 20 nt, synthetic construct
  source 1..20: mol_type = other RNA
catggattatagccttctgt

SEQ ID NO: 6796 - RNA, 20 nt, synthetic construct
  source 1..20: mol_type = other RNA
atggattatagccttctgtt

SEQ ID NO: 6797 - RNA, 20 nt, synthetic construct
  source 1..20: mol_type = other RNA
tggattatagccttctgttg

SEQ ID NO: 6798 - RNA, 20 nt, synthetic construct
  source 1..20: mol_type = other RNA
atcatggattatagccttct

SEQ ID NO: 6799 - RNA, 20 nt, synthetic construct
  source 1..20: mol_type = other RNA
tcatggattatagccttctg

SEQ ID NO: 6800 - RNA, 20 nt, synthetic construct
  source 1..20: mol_type = other RNA
atcaaaacagttcagcacaa

SEQ ID NO: 6801 - RNA, 20 nt, synthetic construct
  source 1..20: mol_type = other RNA
tatcatcaaaacagttcagc

SEQ ID NO: 6802 - RNA, 20 nt, synthetic construct
  source 1..20: mol_type = other RNA
atcatcaaaacagttcagca

SEQ ID NO: 6803 - RNA, 20 nt, synthetic construct
  source 1..20: mol_type = other RNA
tcatcaaaacagttcagcac

SEQ ID NO: 6804 - RNA, 20 nt, synthetic construct
  source 1..20: mol_type = other RNA
catcaaaacagttcagcaca

SEQ ID NO: 6805 - RNA, 20 nt, synthetic construct
  source 1..20: mol_type = other RNA
tcaaaacagttcagcacaaa

SEQ ID NO: 6806 - RNA, 20 nt, synthetic construct
  source 1..20: mol_type = other RNA
caaaacagttcagcacaaag

SEQ ID NO: 6807 - RNA, 20 nt, synthetic construct
  source 1..20: mol_type = other RNA
tcgacatcctgcagtcctac

SEQ ID NO: 6808 - RNA, 20 nt, synthetic construct
  source 1..20: mol_type = other RNA
atcgacatcctgcagtccta

SEQ ID NO: 6809 - RNA, 20 nt, synthetic construct
  source 1..20: mol_type = other RNA
catcgacatcctgcagtcct

SEQ ID NO: 6810 - RNA, 20 nt, synthetic construct
  source 1..20: mol_type = other RNA
tcatcgacatcctgcagtcc

SEQ ID NO: 6811 - RNA, 20 nt, synthetic construct
  source 1..20: mol_type = other RNA
atcatcgacatcctgcagtc

SEQ ID NO: 6812 - RNA, 20 nt, synthetic construct
  source 1..20: mol_type = other RNA
tggactacagcctgctgctg

SEQ ID NO: 6813 - RNA, 20 nt, synthetic construct
  source 1..20: mol_type = other RNA
atggactacagcctgctgct

SEQ ID NO: 6814 - RNA, 20 nt, synthetic construct
  source 1..20: mol_type = other RNA
catggactacagcctgctgc

SEQ ID NO: 6815 - RNA, 20 nt, synthetic construct
  source 1..20: mol_type = other RNA
atcaagaccgtcatgcacaa

SEQ ID NO: 6816 - RNA, 20 nt, synthetic construct
  source 1..20: mol_type = other RNA
catcaagaccgtcatgcaca

SEQ ID NO: 6817 - RNA, 20 nt, synthetic construct
  source 1..20: mol_type = other RNA
tcaagaccgtcatgcacaag

SEQ ID NO: 6818 - RNA, 20 nt, synthetic construct
  source 1..20: mol_type = other RNA
tcatcaagaccgtcatgcac

SEQ ID NO: 6819 - RNA, 20 nt, synthetic construct
  source 1..20: mol_type = other RNA
atcatcaagaccgtcatgca

SEQ ID NO: 6820 - RNA, 20 nt, synthetic construct
  source 1..20: mol_type = other RNA
catcatcaagaccgtcatgc

SEQ ID NO: 6821 - RNA, 20 nt, synthetic construct
  source 1..20: mol_type = other RNA
tggatctcgccacagtctac

SEQ ID NO: 6822 - RNA, 20 nt, synthetic construct
  source 1..20: mol_type = other RNA
gtggatctcgccacagtcta

SEQ ID NO: 6823 - RNA, 20 nt, synthetic construct
  source 1..20: mol_type = other RNA
cgtggatctcgccacagtct

SEQ ID NO: 6824 - RNA, 20 nt, synthetic construct
  source 1..20: mol_type = other RNA
tcgtggatctcgccacagtc

SEQ ID NO: 6825 - RNA, 20 nt, synthetic construct
  source 1..20: mol_type = other RNA
gtcgtggatctcgccacagt

SEQ ID NO: 6826 - RNA, 20 nt, synthetic construct
  source 1..20: mol_type = other RNA
ctggattacagcctcctgat

SEQ ID NO: 6827 - RNA, 20 nt, synthetic construct
  source 1..20: mol_type = other RNA
tggattacagcctcctgata

SEQ ID NO: 6828 - RNA, 20 nt, synthetic construct
  source 1..20: mol_type = other RNA
gctggattacagcctcctga

SEQ ID NO: 6829 - RNA, 20 nt, synthetic construct
  source 1..20: mol_type = other RNA
tgctggattacagcctcctg

SEQ ID NO: 6830 - RNA, 20 nt, synthetic construct
  source 1..20: mol_type = other RNA
gtgctggattacagcctcct

SEQ ID NO: 6831 - RNA, 20 nt, synthetic construct
  source 1..20: mol_type = other RNA
ctgaagacccaggggcgccg

SEQ ID NO: 6832 - RNA, 20 nt, synthetic construct
  source 1..20: mol_type = other RNA
tcctgaagacccaggggcgc

SEQ ID NO: 6833 - RNA, 20 nt, synthetic construct
  source 1..20: mol_type = other RNA
tgaagacccaggggcgccga

SEQ ID NO: 6834 - RNA, 20 nt, synthetic construct
  source 1..20: mol_type = other RNA
cctgaagacccaggggcgcc

SEQ ID NO: 6835 - RNA, 20 nt, synthetic construct
  source 1..20: mol_type = other RNA
ttcctgaagacccaggggcg

SEQ ID NO: 6836 - RNA, 20 nt, synthetic construct
  source 1..20: mol_type = other RNA
cttcctgaagacccaggggc

SEQ ID NO: 6837 - RNA, 20 nt, synthetic construct
  source 1..20: mol_type = other RNA
tgacggacctggatgacgca

SEQ ID NO: 6838 - RNA, 20 nt, synthetic construct
  source 1..20: mol_type = other RNA
acggacctggatgacgcacg

SEQ ID NO: 6839 - RNA, 20 nt, synthetic construct
  source 1..20: mol_type = other RNA
gtgacggacctggatgacgc

SEQ ID NO: 6840 - RNA, 20 nt, synthetic construct
  source 1..20: mol_type = other RNA
gacggacctggatgacgcac

SEQ ID NO: 6841 - RNA, 20 nt, synthetic construct
  source 1..20: mol_type = other RNA
cggacctggatgacgcacgt

SEQ ID NO: 6842 - RNA, 20 nt, synthetic construct
  source 1..20: mol_type = other RNA
gctggacttccgccctcggc

SEQ ID NO: 6843 - RNA, 20 nt, synthetic construct
  source 1..20: mol_type = other RNA
ctgctggacttccgccctcg

SEQ ID NO: 6844 - RNA, 20 nt, synthetic construct
  source 1..20: mol_type = other RNA
tgctggacttccgccctcgg

SEQ ID NO: 6845 - RNA, 20 nt, synthetic construct
  source 1..20: mol_type = other RNA
ctggacttccgccctcggca

SEQ ID NO: 6846 - RNA, 20 nt, synthetic construct
  source 1..20: mol_type = other RNA
tggacttccgccctcggcag

SEQ ID NO: 6847 - RNA, 20 nt, synthetic construct
  source 1..20: mol_type = other RNA
cgctcaaggcggtggacttt

SEQ ID NO: 6848 - RNA, 20 nt, synthetic construct
  source 1..20: mol_type = other RNA
ctcaaggcggtggactttag

SEQ ID NO: 6849 - RNA, 20 nt, synthetic construct
  source 1..20: mol_type = other RNA
tcaaggcggtggactttagc

SEQ ID NO: 6850 - RNA, 20 nt, synthetic construct
  source 1..20: mol_type = other RNA
ggcgctcaaggcggtggact

SEQ ID NO: 6851 - RNA, 20 nt, synthetic construct
  source 1..20: mol_type = other RNA
gcgctcaaggcggtggactt

SEQ ID NO: 6852 - RNA, 20 nt, synthetic construct
  source 1..20: mol_type = other RNA
gctcaaggcggtggacttta

SEQ ID NO: 6853 - RNA, 20 nt, synthetic construct
  source 1..20: mol_type = other RNA
ggtgacttcggactgctggt

SEQ ID NO: 6854 - RNA, 20 nt, synthetic construct
  source 1..20: mol_type = other RNA
gggtgacttcggactgctgg

SEQ ID NO: 6855 - RNA, 20 nt, synthetic construct
  source 1..20: mol_type = other RNA
ctgggtgacttcggactgct

SEQ ID NO: 6856 - RNA, 20 nt, synthetic construct
  source 1..20: mol_type = other RNA
gtgacttcggactgctggtg

SEQ ID NO: 6857 - RNA, 20 nt, synthetic construct
  source 1..20: mol_type = other RNA
tgggtgacttcggactgctg

SEQ ID NO: 6858 - RNA, 20 nt, synthetic construct
  source 1..20: mol_type = other RNA
ttgatgtcaagcctgccaac

SEQ ID NO: 6859 - RNA, 20 nt, synthetic construct
  source 1..20: mol_type = other RNA
cttgatgtcaagcctgccaa

SEQ ID NO: 6860 - RNA, 20 nt, synthetic construct
  source 1..20: mol_type = other RNA
ccttgatgtcaagcctgcca

SEQ ID NO: 6861 - RNA, 20 nt, synthetic construct
  source 1..20: mol_type = other RNA
accttgatgtcaagcctgcc

SEQ ID NO: 6862 - RNA, 20 nt, synthetic construct
  source 1..20: mol_type = other RNA
caccttgatgtcaagcctgc

SEQ ID NO: 6863 - RNA, 20 nt, synthetic construct
  source 1..20: mol_type = other RNA
ccaacatcttcctggggccc

SEQ ID NO: 6864 - RNA, 20 nt, synthetic construct
  source 1..20: mol_type = other RNA
gcctgccaacatcttcctgg

SEQ ID NO: 6865 - RNA, 20 nt, synthetic construct
  source 1..20: mol_type = other RNA
gccaacatcttcctggggcc

SEQ ID NO: 6866 - RNA, 20 nt, synthetic construct
  source 1..20: mol_type = other RNA
tgccaacatcttcctggggc

SEQ ID NO: 6867 - RNA, 20 nt, synthetic construct
  source 1..20: mol_type = other RNA
ctgccaacatcttcctgggg

SEQ ID NO: 6868 - RNA, 20 nt, synthetic construct
  source 1..20: mol_type = other RNA
cctgccaacatcttcctggg

SEQ ID NO: 6869 - RNA, 20 nt, synthetic construct
  source 1..20: mol_type = other RNA
taaagcgttccatgtcacca

SEQ ID NO: 6870 - RNA, 20 nt, synthetic construct
  source 1..20: mol_type = other RNA
gtaaagcgttccatgtcacc

SEQ ID NO: 6871 - RNA, 20 nt, synthetic construct
  source 1..20: mol_type = other RNA
ggtaaagcgttccatgtcac

SEQ ID NO: 6872 - RNA, 20 nt, synthetic construct
  source 1..20: mol_type = other RNA
cggtaaagcgttccatgtca

SEQ ID NO: 6873 - RNA, 20 nt, synthetic construct
  source 1..20: mol_type = other RNA
gcggtaaagcgttccatgtc

SEQ ID NO: 6874 - RNA, 20 nt, synthetic construct
  source 1..20: mol_type = other RNA
tgcggtaaagcgttccatgt

SEQ ID NO: 6875 - RNA, 20 nt, synthetic construct
  source 1..20: mol_type = other RNA
cgcagactttggcctctgca

SEQ ID NO: 6876 - RNA, 20 nt, synthetic construct
  source 1..20: mol_type = other RNA
gcagactttggcctctgcaa

SEQ ID NO: 6877 - RNA, 20 nt, synthetic construct
  source 1..20: mol_type = other RNA
atcgcagactttggcctctg

SEQ ID NO: 6878 - RNA, 20 nt, synthetic construct
  source 1..20: mol_type = other RNA
tcgcagactttggcctctgc

SEQ ID NO: 6879 - RNA, 20 nt, synthetic construct
  source 1..20: mol_type = other RNA
cagactttggcctctgcaag

SEQ ID NO: 6880 - RNA, 20 nt, synthetic construct
  source 1..20: mol_type = other RNA
aacagggacctgaagttgga

SEQ ID NO: 6881 - RNA, 20 nt, synthetic construct
  source 1..20: mol_type = other RNA
acagggacctgaagttggac

SEQ ID NO: 6882 - RNA, 20 nt, synthetic construct
  source 1..20: mol_type = other RNA
cagggacctgaagttggaca

SEQ ID NO: 6883 - RNA, 20 nt, synthetic construct
  source 1..20: mol_type = other RNA
agggacctgaagttggacaa

SEQ ID NO: 6884 - RNA, 20 nt, synthetic construct
  source 1..20: mol_type = other RNA
gggacctgaagttggacaat

SEQ ID NO: 6885 - RNA, 20 nt, synthetic construct
  source 1..20: mol_type = other RNA
gacaatttgctcctggacac

SEQ ID NO: 6886 - RNA, 20 nt, synthetic construct
  source 1..20: mol_type = other RNA
gttggacaatttgctcctgg

SEQ ID NO: 6887 - RNA, 20 nt, synthetic construct
  source 1..20: mol_type = other RNA
ttggacaatttgctcctgga

SEQ ID NO: 6888 - RNA, 20 nt, synthetic construct
  source 1..20: mol_type = other RNA
tggacaatttgctcctggac

SEQ ID NO: 6889 - RNA, 20 nt, synthetic construct
  source 1..20: mol_type = other RNA
ggacaatttgctcctggaca

SEQ ID NO: 6890 - RNA, 20 nt, synthetic construct
  source 1..20: mol_type = other RNA
acaatttgctcctggacacc

SEQ ID NO: 6891 - RNA, 20 nt, synthetic construct
  source 1..20: mol_type = other RNA
gccatcaaggctctgaagaa

SEQ ID NO: 6892 - RNA, 20 nt, synthetic construct
  source 1..20: mol_type = other RNA
ccatcaaggctctgaagaaa

SEQ ID NO: 6893 - RNA, 20 nt, synthetic construct
  source 1..20: mol_type = other RNA
catcaaggctctgaagaaag

SEQ ID NO: 6894 - RNA, 20 nt, synthetic construct
  source 1..20: mol_type = other RNA
atcaaggctctgaagaaagg

SEQ ID NO: 6895 - RNA, 20 nt, synthetic construct
  source 1..20: mol_type = other RNA
cgccatcaaggctctgaaga

SEQ ID NO: 6896 - RNA, 20 nt, synthetic construct
  source 1..20: mol_type = other RNA
tcaaggctctgaagaaaggg

SEQ ID NO: 6897 - RNA, 20 nt, synthetic construct
  source 1..20: mol_type = other RNA
aacagagatttgaaattgga

SEQ ID NO: 6898 - RNA, 20 nt, synthetic construct
  source 1..20: mol_type = other RNA
acagagatttgaaattggat

SEQ ID NO: 6899 - RNA, 20 nt, synthetic construct
  source 1..20: mol_type = other RNA
cagagatttgaaattggata

SEQ ID NO: 6900 - RNA, 20 nt, synthetic construct
  source 1..20: mol_type = other RNA
agagatttgaaattggataa

SEQ ID NO: 6901 - RNA, 20 nt, synthetic construct
  source 1..20: mol_type = other RNA
gagatttgaaattggataac

SEQ ID NO: 6902 - RNA, 20 nt, synthetic construct
  source 1..20: mol_type = other RNA
gataacttattgctagatac

SEQ ID NO: 6903 - RNA, 20 nt, synthetic construct
  source 1..20: mol_type = other RNA
attggataacttattgctag

SEQ ID NO: 6904 - RNA, 20 nt, synthetic construct
  source 1..20: mol_type = other RNA
ttggataacttattgctaga

SEQ ID NO: 6905 - RNA, 20 nt, synthetic construct
  source 1..20: mol_type = other RNA
tggataacttattgctagat

SEQ ID NO: 6906 - RNA, 20 nt, synthetic construct
  source 1..20: mol_type = other RNA
ggataacttattgctagata

SEQ ID NO: 6907 - RNA, 20 nt, synthetic construct
  source 1..20: mol_type = other RNA
ataacttattgctagataca

SEQ ID NO: 6908 - RNA, 20 nt, synthetic construct
  source 1..20: mol_type = other RNA
gctataaaagccttaaagaa

SEQ ID NO: 6909 - RNA, 20 nt, synthetic construct
  source 1..20: mol_type = other RNA
ctataaaagccttaaagaaa

SEQ ID NO: 6910 - RNA, 20 nt, synthetic construct
  source 1..20: mol_type = other RNA
ataaaagccttaaagaaagg

SEQ ID NO: 6911 - RNA, 20 nt, synthetic construct
  source 1..20: mol_type = other RNA
tgctataaaagccttaaaga

SEQ ID NO: 6912 - RNA, 20 nt, synthetic construct
  source 1..20: mol_type = other RNA
tataaaagccttaaagaaag

SEQ ID NO: 6913 - RNA, 20 nt, synthetic construct
  source 1..20: mol_type = other RNA
taaaagccttaaagaaagga

SEQ ID NO: 6914 - RNA, 20 nt, synthetic construct
  source 1..20: mol_type = other RNA
aaaagccttaaagaaaggag

SEQ ID NO: 6915 - RNA, 20 nt, synthetic construct
  source 1..20: mol_type = other RNA
cgcagactttggactctgca

SEQ ID NO: 6916 - RNA, 20 nt, synthetic construct
  source 1..20: mol_type = other RNA
gcagactttggactctgcaa

SEQ ID NO: 6917 - RNA, 20 nt, synthetic construct
  source 1..20: mol_type = other RNA
atcgcagactttggactctg

SEQ ID NO: 6918 - RNA, 20 nt, synthetic construct
  source 1..20: mol_type = other RNA
tcgcagactttggactctgc

SEQ ID NO: 6919 - RNA, 20 nt, synthetic construct
  source 1..20: mol_type = other RNA
cagactttggactctgcaag

SEQ ID NO: 6920 - RNA, 20 nt, synthetic construct
  source 1..20: mol_type = other RNA
ctcagggacctgaagttgga

SEQ ID NO: 6921 - RNA, 20 nt, synthetic construct
  source 1..20: mol_type = other RNA
tcagggacctgaagttggat

SEQ ID NO: 6922 - RNA, 20 nt, synthetic construct
  source 1..20: mol_type = other RNA
cagggacctgaagttggata

SEQ ID NO: 6923 - RNA, 20 nt, synthetic construct
  source 1..20: mol_type = other RNA
agggacctgaagttggataa

SEQ ID NO: 6924 - RNA, 20 nt, synthetic construct
  source 1..20: mol_type = other RNA
gggacctgaagttggataac

SEQ ID NO: 6925 - RNA, 20 nt, synthetic construct
  source 1..20: mol_type = other RNA
ttggataaccttctgctgga

SEQ ID NO: 6926 - RNA, 20 nt, synthetic construct
  source 1..20: mol_type = other RNA
gttggataaccttctgctgg

SEQ ID NO: 6927 - RNA, 20 nt, synthetic construct
  source 1..20: mol_type = other RNA
tggataaccttctgctggat

SEQ ID NO: 6928 - RNA, 20 nt, synthetic construct
  source 1..20: mol_type = other RNA
ggataaccttctgctggatg

SEQ ID NO: 6929 - RNA, 20 nt, synthetic construct
  source 1..20: mol_type = other RNA
gataaccttctgctggatgc

SEQ ID NO: 6930 - RNA, 20 nt, synthetic construct
  source 1..20: mol_type = other RNA
ataaccttctgctggatgcc

SEQ ID NO: 6931 - RNA, 20 nt, synthetic construct
  source 1..20: mol_type = other RNA
cgccatcaaagcactgaaga

SEQ ID NO: 6932 - RNA, 20 nt, synthetic construct
  source 1..20: mol_type = other RNA
catcaaagcactgaagaagc

SEQ ID NO: 6933 - RNA, 20 nt, synthetic construct
  source 1..20: mol_type = other RNA
atcaaagcactgaagaagca

SEQ ID NO: 6934 - RNA, 20 nt, synthetic construct
  source 1..20: mol_type = other RNA
caaagcactgaagaagcagg

SEQ ID NO: 6935 - RNA, 20 nt, synthetic construct
  source 1..20: mol_type = other RNA
gccatcaaagcactgaagaa

SEQ ID NO: 6936 - RNA, 20 nt, synthetic construct
  source 1..20: mol_type = other RNA
ccatcaaagcactgaagaag

SEQ ID NO: 6937 - RNA, 20 nt, synthetic construct
  source 1..20: mol_type = other RNA
tcaaagcactgaagaagcag

SEQ ID NO: 6938 - RNA, 20 nt, synthetic construct
  source 1..20: mol_type = other RNA
catcgagacctcaagctggg

SEQ ID NO: 6939 - RNA, 20 nt, synthetic construct
  source 1..20: mol_type = other RNA
atcgagacctcaagctgggc

SEQ ID NO: 6940 - RNA, 20 nt, synthetic construct
  source 1..20: mol_type = other RNA
tcgagacctcaagctgggca

SEQ ID NO: 6941 - RNA, 20 nt, synthetic construct
  source 1..20: mol_type = other RNA
cgagacctcaagctgggcaa

SEQ ID NO: 6942 - RNA, 20 nt, synthetic construct
  source 1..20: mol_type = other RNA
gagacctcaagctgggcaac

SEQ ID NO: 6943 - RNA, 20 nt, synthetic construct
  source 1..20: mol_type = other RNA
cgcgggcaagattgtgccta

SEQ ID NO: 6944 - RNA, 20 nt, synthetic construct
  source 1..20: mol_type = other RNA
gcgggcaagattgtgcctaa

SEQ ID NO: 6945 - RNA, 20 nt, synthetic construct
  source 1..20: mol_type = other RNA
cgggcaagattgtgcctaag

SEQ ID NO: 6946 - RNA, 20 nt, synthetic construct
  source 1..20: mol_type = other RNA
gggcaagattgtgcctaagt

SEQ ID NO: 6947 - RNA, 20 nt, synthetic construct
  source 1..20: mol_type = other RNA
ggcaagattgtgcctaagtc

SEQ ID NO: 6948 - RNA, 20 nt, synthetic construct
  source 1..20: mol_type = other RNA
gcaagattgtgcctaagtct

SEQ ID NO: 6949 - RNA, 20 nt, synthetic construct
  source 1..20: mol_type = other RNA
gggacttcggtctggcagcc

SEQ ID NO: 6950 - RNA, 20 nt, synthetic construct
  source 1..20: mol_type = other RNA
gttggggacttcggtctggc

SEQ ID NO: 6951 - RNA, 20 nt, synthetic construct
  source 1..20: mol_type = other RNA
ggggacttcggtctggcagc

SEQ ID NO: 6952 - RNA, 20 nt, synthetic construct
  source 1..20: mol_type = other RNA
tggggacttcggtctggcag

SEQ ID NO: 6953 - RNA, 20 nt, synthetic construct
  source 1..20: mol_type = other RNA
ttggggacttcggtctggca

SEQ ID NO: 6954 - RNA, 20 nt, synthetic construct
  source 1..20: mol_type = other RNA
cagagatctcaaactaggta

SEQ ID NO: 6955 - RNA, 20 nt, synthetic construct
  source 1..20: mol_type = other RNA
gagatctcaaactaggtaag

SEQ ID NO: 6956 - RNA, 20 nt, synthetic construct
  source 1..20: mol_type = other RNA
agagatctcaaactaggtaa

SEQ ID NO: 6957 - RNA, 20 nt, synthetic construct
  source 1..20: mol_type = other RNA
acagagatctcaaactaggt

SEQ ID NO: 6958 - RNA, 20 nt, synthetic construct
  source 1..20: mol_type = other RNA
cacagagatctcaaactagg

SEQ ID NO: 6959 - RNA, 20 nt, synthetic construct
  source 1..20: mol_type = other RNA
caccgggacctcaagttggg

SEQ ID NO: 6960 - RNA, 20 nt, synthetic construct
  source 1..20: mol_type = other RNA
ccgggacctcaagttgggtg

SEQ ID NO: 6961 - RNA, 20 nt, synthetic construct
  source 1..20: mol_type = other RNA
accgggacctcaagttgggt

SEQ ID NO: 6962 - RNA, 20 nt, synthetic construct
  source 1..20: mol_type = other RNA
cgggacctcaagttgggtga

SEQ ID NO: 6963 - RNA, 20 nt, synthetic construct
  source 1..20: mol_type = other RNA
gggacctcaagttgggtgag

SEQ ID NO: 6964 - RNA, 20 nt, synthetic construct
  source 1..20: mol_type = other RNA
cgctgtcaaagtcatcccgc

SEQ ID NO: 6965 - RNA, 20 nt, synthetic construct
  source 1..20: mol_type = other RNA
ctgtcaaagtcatcccgcag

SEQ ID NO: 6966 - RNA, 20 nt, synthetic construct
  source 1..20: mol_type = other RNA
tcaaagtcatcccgcagagc

SEQ ID NO: 6967 - RNA, 20 nt, synthetic construct
  source 1..20: mol_type = other RNA
gctgtcaaagtcatcccgca

SEQ ID NO: 6968 - RNA, 20 nt, synthetic construct
  source 1..20: mol_type = other RNA
tgtcaaagtcatcccgcaga

SEQ ID NO: 6969 - RNA, 20 nt, synthetic construct
  source 1..20: mol_type = other RNA
gtcaaagtcatcccgcagag

SEQ ID NO: 6970 - RNA, 20 nt, synthetic construct
  source 1..20: mol_type = other RNA
caaagtcatcccgcagagcc

SEQ ID NO: 6971 - RNA, 20 nt, synthetic construct
  source 1..20: mol_type = other RNA
caccgggacctcacactttc

SEQ ID NO: 6972 - RNA, 20 nt, synthetic construct
  source 1..20: mol_type = other RNA
accgggacctcacactttct

SEQ ID NO: 6973 - RNA, 20 nt, synthetic construct
  source 1..20: mol_type = other RNA
ccgggacctcacactttcta

SEQ ID NO: 6974 - RNA, 20 nt, synthetic construct
  source 1..20: mol_type = other RNA
cgggacctcacactttctaa

SEQ ID NO: 6975 - RNA, 20 nt, synthetic construct
  source 1..20: mol_type = other RNA
gggacctcacactttctaac

SEQ ID NO: 6976 - RNA, 20 nt, synthetic construct
  source 1..20: mol_type = other RNA
tttctaacctcctactgact

SEQ ID NO: 6977 - RNA, 20 nt, synthetic construct
  source 1..20: mol_type = other RNA
actttctaacctcctactga

SEQ ID NO: 6978 - RNA, 20 nt, synthetic construct
  source 1..20: mol_type = other RNA
ctttctaacctcctactgac

SEQ ID NO: 6979 - RNA, 20 nt, synthetic construct
  source 1..20: mol_type = other RNA
ttctaacctcctactgactc

SEQ ID NO: 6980 - RNA, 20 nt, synthetic construct
  source 1..20: mol_type = other RNA
tctaacctcctactgactcg

SEQ ID NO: 6981 - RNA, 20 nt, synthetic construct
  source 1..20: mol_type = other RNA
ctaacctcctactgactcgt

SEQ ID NO: 6982 - RNA, 20 nt, synthetic construct
  source 1..20: mol_type = other RNA
tgcaatcaaaatggtaagaa

SEQ ID NO: 6983 - RNA, 20 nt, synthetic construct
  source 1..20: mol_type = other RNA
gcaatcaaaatggtaagaat

SEQ ID NO: 6984 - RNA, 20 nt, synthetic construct
  source 1..20: mol_type = other RNA
caatcaaaatggtaagaata

SEQ ID NO: 6985 - RNA, 20 nt, synthetic construct
  source 1..20: mol_type = other RNA
aatcaaaatggtaagaataa

SEQ ID NO: 6986 - RNA, 20 nt, synthetic construct
  source 1..20: mol_type = other RNA
atcaaaatggtaagaataaa

SEQ ID NO: 6987 - RNA, 20 nt, synthetic construct
  source 1..20: mol_type = other RNA
tcaaaatggtaagaataaac

SEQ ID NO: 6988 - RNA, 20 nt, synthetic construct
  source 1..20: mol_type = other RNA
caaaatggtaagaataaact

SEQ ID NO: 6989 - RNA, 20 nt, synthetic construct
  source 1..20: mol_type = other RNA
ctgactttggactctccaaa

SEQ ID NO: 6990 - RNA, 20 nt, synthetic construct
  source 1..20: mol_type = other RNA
tctgactttggactctccaa

SEQ ID NO: 6991 - RNA, 20 nt, synthetic construct
  source 1..20: mol_type = other RNA
ctctgactttggactctcca

SEQ ID NO: 6992 - RNA, 20 nt, synthetic construct
  source 1..20: mol_type = other RNA
tctctgactttggactctcc

SEQ ID NO: 6993 - RNA, 20 nt, synthetic construct
  source 1..20: mol_type = other RNA
gtctctgactttggactctc

SEQ ID NO: 6994 - RNA, 20 nt, synthetic construct
  source 1..20: mol_type = other RNA
gggacctcaaggtgcctggc

SEQ ID NO: 6995 - RNA, 20 nt, synthetic construct
  source 1..20: mol_type = other RNA
accgggacctcaaggtgcct

SEQ ID NO: 6996 - RNA, 20 nt, synthetic construct
  source 1..20: mol_type = other RNA
caccgggacctcaaggtgcc

SEQ ID NO: 6997 - RNA, 20 nt, synthetic construct
  source 1..20: mol_type = other RNA
cgggacctcaaggtgcctgg

SEQ ID NO: 6998 - RNA, 20 nt, synthetic construct
  source 1..20: mol_type = other RNA
ccgggacctcaaggtgcctg

SEQ ID NO: 6999 - RNA, 20 nt, synthetic construct
  source 1..20: mol_type = other RNA
cgaaaacctcctgtatgcca

SEQ ID NO: 7000 - RNA, 20 nt, synthetic construct
  source 1..20: mol_type = other RNA
aaaacctcctgtatgccacg

SEQ ID NO: 7001 - RNA, 20 nt, synthetic construct
  source 1..20: mol_type = other RNA
gaaaacctcctgtatgccac

SEQ ID NO: 7002 - RNA, 20 nt, synthetic construct
  source 1..20: mol_type = other RNA
ccgaaaacctcctgtatgcc

SEQ ID NO: 7003 - RNA, 20 nt, synthetic construct
  source 1..20: mol_type = other RNA
cccgaaaacctcctgtatgc

SEQ ID NO: 7004 - RNA, 20 nt, synthetic construct
  source 1..20: mol_type = other RNA
gcccgaaaacctcctgtatg

SEQ ID NO: 7005 - RNA, 20 nt, synthetic construct
  source 1..20: mol_type = other RNA
ctcaagtgcatccccaagaa

SEQ ID NO: 7006 - RNA, 20 nt, synthetic construct
  source 1..20: mol_type = other RNA
cctcaagtgcatccccaaga

SEQ ID NO: 7007 - RNA, 20 nt, synthetic construct
  source 1..20: mol_type = other RNA
ggccctcaagtgcatcccca

SEQ ID NO: 7008 - RNA, 20 nt, synthetic construct
  source 1..20: mol_type = other RNA
tcaagtgcatccccaagaag

SEQ ID NO: 7009 - RNA, 20 nt, synthetic construct
  source 1..20: mol_type = other RNA
ccctcaagtgcatccccaag

SEQ ID NO: 7010 - RNA, 20 nt, synthetic construct
  source 1..20: mol_type = other RNA
gccctcaagtgcatccccaa

SEQ ID NO: 7011 - RNA, 20 nt, synthetic construct
  source 1..20: mol_type = other RNA
gcaaatgacttggacgcctt

SEQ ID NO: 7012 - RNA, 20 nt, synthetic construct
  source 1..20: mol_type = other RNA
caaatgacttggacgcctta

SEQ ID NO: 7013 - RNA, 20 nt, synthetic construct
  source 1..20: mol_type = other RNA
aaatgacttggacgccttac

SEQ ID NO: 7014 - RNA, 20 nt, synthetic construct
  source 1..20: mol_type = other RNA
aatgacttggacgccttacc

SEQ ID NO: 7015 - RNA, 20 nt, synthetic construct
  source 1..20: mol_type = other RNA
atgacttggacgccttaccc

SEQ ID NO: 7016 - RNA, 20 nt, synthetic construct
  source 1..20: mol_type = other RNA
gtgcgactccaacgacctgc

SEQ ID NO: 7017 - RNA, 20 nt, synthetic construct
  source 1..20: mol_type = other RNA
atgtgcgactccaacgacct

SEQ ID NO: 7018 - RNA, 20 nt, synthetic construct
  source 1..20: mol_type = other RNA
tgtgcgactccaacgacctg

SEQ ID NO: 7019 - RNA, 20 nt, synthetic construct
  source 1..20: mol_type = other RNA
tgcgactccaacgacctgcc

SEQ ID NO: 7020 - RNA, 20 nt, synthetic construct
  source 1..20: mol_type = other RNA
gcgactccaacgacctgccg

SEQ ID NO: 7021 - RNA, 20 nt, synthetic construct
  source 1..20: mol_type = other RNA
tgtcccagtatctgctaaca

SEQ ID NO: 7022 - RNA, 20 nt, synthetic construct
  source 1..20: mol_type = other RNA
ctgtcccagtatctgctaac

SEQ ID NO: 7023 - RNA, 20 nt, synthetic construct
  source 1..20: mol_type = other RNA
gtcccagtatctgctaacaa

SEQ ID NO: 7024 - RNA, 20 nt, synthetic construct
  source 1..20: mol_type = other RNA
tcccagtatctgctaacaag

SEQ ID NO: 7025 - RNA, 20 nt, synthetic construct
  source 1..20: mol_type = other RNA
cccagtatctgctaacaagc

SEQ ID NO: 7026 - RNA, 20 nt, synthetic construct
  source 1..20: mol_type = other RNA
agctgtaaagagagtgagtc

SEQ ID NO: 7027 - RNA, 20 nt, synthetic construct
  source 1..20: mol_type = other RNA
gctgtaaagagagtgagtcc

SEQ ID NO: 7028 - RNA, 20 nt, synthetic construct
  source 1..20: mol_type = other RNA
ctgtaaagagagtgagtccg

SEQ ID NO: 7029 - RNA, 20 nt, synthetic construct
  source 1..20: mol_type = other RNA
tgtaaagagagtgagtccgg

SEQ ID NO: 7030 - RNA, 20 nt, synthetic construct
  source 1..20: mol_type = other RNA
gtaaagagagtgagtccggg

SEQ ID NO: 7031 - RNA, 20 nt, synthetic construct
  source 1..20: mol_type = other RNA
taaagagagtgagtccgggt

SEQ ID NO: 7032 - RNA, 20 nt, synthetic construct
  source 1..20: mol_type = other RNA
gggacctgtgcctggagaac

SEQ ID NO: 7033 - RNA, 20 nt, synthetic construct
  source 1..20: mol_type = other RNA
cgggacctgtgcctggagaa

SEQ ID NO: 7034 - RNA, 20 nt, synthetic construct
  source 1..20: mol_type = other RNA
ccgggacctgtgcctggaga

SEQ ID NO: 7035 - RNA, 20 nt, synthetic construct
  source 1..20: mol_type = other RNA
accgggacctgtgcctggag

SEQ ID NO: 7036 - RNA, 20 nt, synthetic construct
  source 1..20: mol_type = other RNA
caccgggacctgtgcctgga

SEQ ID NO: 7037 - RNA, 20 nt, synthetic construct
  source 1..20: mol_type = other RNA
agaacctgctgctggtgcac

SEQ ID NO: 7038 - RNA, 20 nt, synthetic construct
  source 1..20: mol_type = other RNA
cctggagaacctgctgctgg

SEQ ID NO: 7039 - RNA, 20 nt, synthetic construct
  source 1..20: mol_type = other RNA
gagaacctgctgctggtgca

SEQ ID NO: 7040 - RNA, 20 nt, synthetic construct
  source 1..20: mol_type = other RNA
ggagaacctgctgctggtgc

SEQ ID NO: 7041 - RNA, 20 nt, synthetic construct
  source 1..20: mol_type = other RNA
tggagaacctgctgctggtg

SEQ ID NO: 7042 - RNA, 20 nt, synthetic construct
  source 1..20: mol_type = other RNA
ctggagaacctgctgctggt

SEQ ID NO: 7043 - RNA, 20 nt, synthetic construct
  source 1..20: mol_type = other RNA
gaaagtaggtaccactccct

SEQ ID NO: 7044 - RNA, 20 nt, synthetic construct
  source 1..20: mol_type = other RNA
tgaaagtaggtaccactccc

SEQ ID NO: 7045 - RNA, 20 nt, synthetic construct
  source 1..20: mol_type = other RNA
gtgaaagtaggtaccactcc

SEQ ID NO: 7046 - RNA, 20 nt, synthetic construct
  source 1..20: mol_type = other RNA
tgtgaaagtaggtaccactc

SEQ ID NO: 7047 - RNA, 20 nt, synthetic construct
  source 1..20: mol_type = other RNA
ctgtgaaagtaggtaccact

SEQ ID NO: 7048 - RNA, 20 nt, synthetic construct
  source 1..20: mol_type = other RNA
gctgtgaaagtaggtaccac

SEQ ID NO: 7049 - RNA, 20 nt, synthetic construct
  source 1..20: mol_type = other RNA
tgctgtgaaagtaggtacca

SEQ ID NO: 7050 - RNA, 20 nt, synthetic construct
  source 1..20: mol_type = other RNA
agagatttgaaacctgaaaa

SEQ ID NO: 7051 - RNA, 20 nt, synthetic construct
  source 1..20: mol_type = other RNA
gagatttgaaacctgaaaat

SEQ ID NO: 7052 - RNA, 20 nt, synthetic construct
  source 1..20: mol_type = other RNA
tagagatttgaaacctgaaa

SEQ ID NO: 7053 - RNA, 20 nt, synthetic construct
  source 1..20: mol_type = other RNA
atagagatttgaaacctgaa

SEQ ID NO: 7054 - RNA, 20 nt, synthetic construct
  source 1..20: mol_type = other RNA
catagagatttgaaacctga

SEQ ID NO: 7055 - RNA, 20 nt, synthetic construct
  source 1..20: mol_type = other RNA
cctgaaaatgtcctgcttga

SEQ ID NO: 7056 - RNA, 20 nt, synthetic construct
  source 1..20: mol_type = other RNA
aaaatgtcctgcttgatgca

SEQ ID NO: 7057 - RNA, 20 nt, synthetic construct
  source 1..20: mol_type = other RNA
gaaaatgtcctgcttgatgc

SEQ ID NO: 7058 - RNA, 20 nt, synthetic construct
  source 1..20: mol_type = other RNA
tgaaaatgtcctgcttgatg

SEQ ID NO: 7059 - RNA, 20 nt, synthetic construct
  source 1..20: mol_type = other RNA
ctgaaaatgtcctgcttgat

SEQ ID NO: 7060 - RNA, 20 nt, synthetic construct
  source 1..20: mol_type = other RNA
acctgaaaatgtcctgcttg

SEQ ID NO: 7061 - RNA, 20 nt, synthetic construct
  source 1..20: mol_type = other RNA
tgtgaagatactcaatcgac

SEQ ID NO: 7062 - RNA, 20 nt, synthetic construct
  source 1..20: mol_type = other RNA
tgaagatactcaatcgacag

SEQ ID NO: 7063 - RNA, 20 nt, synthetic construct
  source 1..20: mol_type = other RNA
gtgaagatactcaatcgaca

SEQ ID NO: 7064 - RNA, 20 nt, synthetic construct
  source 1..20: mol_type = other RNA
ctgtgaagatactcaatcga

SEQ ID NO: 7065 - RNA, 20 nt, synthetic construct
  source 1..20: mol_type = other RNA
gctgtgaagatactcaatcg

SEQ ID NO: 7066 - RNA, 20 nt, synthetic construct
  source 1..20: mol_type = other RNA
agctgtgaagatactcaatc

SEQ ID NO: 7067 - RNA, 20 nt, synthetic construct
  source 1..20: mol_type = other RNA
atagccgatttcggtatgta

SEQ ID NO: 7068 - RNA, 20 nt, synthetic construct
  source 1..20: mol_type = other RNA
tagccgatttcggtatgtaa

SEQ ID NO: 7069 - RNA, 20 nt, synthetic construct
  source 1..20: mol_type = other RNA
agccgatttcggtatgtaac

SEQ ID NO: 7070 - RNA, 20 nt, synthetic construct
  source 1..20: mol_type = other RNA
gccgatttcggtatgtaact

SEQ ID NO: 7071 - RNA, 20 nt, synthetic construct
  source 1..20: mol_type = other RNA
ccgatttcggtatgtaactc

SEQ ID NO: 7072 - RNA, 20 nt, synthetic construct
  source 1..20: mol_type = other RNA
cgagacctgaaaccagagaa

SEQ ID NO: 7073 - RNA, 20 nt, synthetic construct
  source 1..20: mol_type = other RNA
catcgagacctgaaaccaga

SEQ ID NO: 7074 - RNA, 20 nt, synthetic construct
  source 1..20: mol_type = other RNA
atcgagacctgaaaccagag

SEQ ID NO: 7075 - RNA, 20 nt, synthetic construct
  source 1..20: mol_type = other RNA
tcgagacctgaaaccagaga

SEQ ID NO: 7076 - RNA, 20 nt, synthetic construct
  source 1..20: mol_type = other RNA
gagacctgaaaccagagaat

SEQ ID NO: 7077 - RNA, 20 nt, synthetic construct
  source 1..20: mol_type = other RNA
ccagagaatgtcctgttgga

SEQ ID NO: 7078 - RNA, 20 nt, synthetic construct
  source 1..20: mol_type = other RNA
accagagaatgtcctgttgg

SEQ ID NO: 7079 - RNA, 20 nt, synthetic construct
  source 1..20: mol_type = other RNA
cagagaatgtcctgttggat

SEQ ID NO: 7080 - RNA, 20 nt, synthetic construct
  source 1..20: mol_type = other RNA
agagaatgtcctgttggatg

SEQ ID NO: 7081 - RNA, 20 nt, synthetic construct
  source 1..20: mol_type = other RNA
gagaatgtcctgttggatgc

SEQ ID NO: 7082 - RNA, 20 nt, synthetic construct
  source 1..20: mol_type = other RNA
agaatgtcctgttggatgca

SEQ ID NO: 7083 - RNA, 20 nt, synthetic construct
  source 1..20: mol_type = other RNA
agttaaaatcttaaatagac

SEQ ID NO: 7084 - RNA, 20 nt, synthetic construct
  source 1..20: mol_type = other RNA
taaaatcttaaatagacaga

SEQ ID NO: 7085 - RNA, 20 nt, synthetic construct
  source 1..20: mol_type = other RNA
ggcagttaaaatcttaaata

SEQ ID NO: 7086 - RNA, 20 nt, synthetic construct
  source 1..20: mol_type = other RNA
gcagttaaaatcttaaatag

SEQ ID NO: 7087 - RNA, 20 nt, synthetic construct
  source 1..20: mol_type = other RNA
cagttaaaatcttaaataga

SEQ ID NO: 7088 - RNA, 20 nt, synthetic construct
  source 1..20: mol_type = other RNA
gttaaaatcttaaatagaca

SEQ ID NO: 7089 - RNA, 20 nt, synthetic construct
  source 1..20: mol_type = other RNA
ttaaaatcttaaatagacag

SEQ ID NO: 7090 - RNA, 20 nt, synthetic construct
  source 1..20: mol_type = other RNA
cagacttcggtttcgccaag

SEQ ID NO: 7091 - RNA, 20 nt, synthetic construct
  source 1..20: mol_type = other RNA
gacagacttcggtttcgcca

SEQ ID NO: 7092 - RNA, 20 nt, synthetic construct
  source 1..20: mol_type = other RNA
acagacttcggtttcgccaa

SEQ ID NO: 7093 - RNA, 20 nt, synthetic construct
  source 1..20: mol_type = other RNA
tgacagacttcggtttcgcc

SEQ ID NO: 7094 - RNA, 20 nt, synthetic construct
  source 1..20: mol_type = other RNA
gtgacagacttcggtttcgc

SEQ ID NO: 7095 - RNA, 20 nt, synthetic construct
  source 1..20: mol_type = other RNA
gggacctgaagccggagaat

SEQ ID NO: 7096 - RNA, 20 nt, synthetic construct
  source 1..20: mol_type = other RNA
agggacctgaagccggagaa

SEQ ID NO: 7097 - RNA, 20 nt, synthetic construct
  source 1..20: mol_type = other RNA
cagggacctgaagccggaga

SEQ ID NO: 7098 - RNA, 20 nt, synthetic construct
  source 1..20: mol_type = other RNA
acagggacctgaagccggag

SEQ ID NO: 7099 - RNA, 20 nt, synthetic construct
  source 1..20: mol_type = other RNA
tacagggacctgaagccgga

SEQ ID NO: 7100 - RNA, 20 nt, synthetic construct
  source 1..20: mol_type = other RNA
ggagaatctgctcattgacc

SEQ ID NO: 7101 - RNA, 20 nt, synthetic construct
  source 1..20: mol_type = other RNA
agaatctgctcattgaccag

SEQ ID NO: 7102 - RNA, 20 nt, synthetic construct
  source 1..20: mol_type = other RNA
gagaatctgctcattgacca

SEQ ID NO: 7103 - RNA, 20 nt, synthetic construct
  source 1..20: mol_type = other RNA
cggagaatctgctcattgac

SEQ ID NO: 7104 - RNA, 20 nt, synthetic construct
  source 1..20: mol_type = other RNA
ccggagaatctgctcattga

SEQ ID NO: 7105 - RNA, 20 nt, synthetic construct
  source 1..20: mol_type = other RNA
gccggagaatctgctcattg

SEQ ID NO: 7106 - RNA, 20 nt, synthetic construct
  source 1..20: mol_type = other RNA
catgaagatcctcgacaaac

SEQ ID NO: 7107 - RNA, 20 nt, synthetic construct
  source 1..20: mol_type = other RNA
tgaagatcctcgacaaacag

SEQ ID NO: 7108 - RNA, 20 nt, synthetic construct
  source 1..20: mol_type = other RNA
atgaagatcctcgacaaaca

SEQ ID NO: 7109 - RNA, 20 nt, synthetic construct
  source 1..20: mol_type = other RNA
ccatgaagatcctcgacaaa

SEQ ID NO: 7110 - RNA, 20 nt, synthetic construct
  source 1..20: mol_type = other RNA
gccatgaagatcctcgacaa

SEQ ID NO: 7111 - RNA, 20 nt, synthetic construct
  source 1..20: mol_type = other RNA
tgccatgaagatcctcgaca

SEQ ID NO: 7112 - RNA, 20 nt, synthetic construct
  source 1..20: mol_type = other RNA
cagactttgggtttgccaaa

SEQ ID NO: 7113 - RNA, 20 nt, synthetic construct
  source 1..20: mol_type = other RNA
gtcacagactttgggtttgc

SEQ ID NO: 7114 - RNA, 20 nt, synthetic construct
  source 1..20: mol_type = other RNA
tcacagactttgggtttgcc

SEQ ID NO: 7115 - RNA, 20 nt, synthetic construct
  source 1..20: mol_type = other RNA
cacagactttgggtttgcca

SEQ ID NO: 7116 - RNA, 20 nt, synthetic construct
  source 1..20: mol_type = other RNA
acagactttgggtttgccaa

SEQ ID NO: 7117 - RNA, 20 nt, synthetic construct
  source 1..20: mol_type = other RNA
tacagagatctaaaacctga

SEQ ID NO: 7118 - RNA, 20 nt, synthetic construct
  source 1..20: mol_type = other RNA
acagagatctaaaacctgaa

SEQ ID NO: 7119 - RNA, 20 nt, synthetic construct
  source 1..20: mol_type = other RNA
cagagatctaaaacctgaaa

SEQ ID NO: 7120 - RNA, 20 nt, synthetic construct
  source 1..20: mol_type = other RNA
agagatctaaaacctgaaaa

SEQ ID NO: 7121 - RNA, 20 nt, synthetic construct
  source 1..20: mol_type = other RNA
gagatctaaaacctgaaaat

SEQ ID NO: 7122 - RNA, 20 nt, synthetic construct
  source 1..20: mol_type = other RNA
acctgaaaatctcttaattg

SEQ ID NO: 7123 - RNA, 20 nt, synthetic construct
  source 1..20: mol_type = other RNA
cctgaaaatctcttaattga

SEQ ID NO: 7124 - RNA, 20 nt, synthetic construct
  source 1..20: mol_type = other RNA
ctgaaaatctcttaattgac

SEQ ID NO: 7125 - RNA, 20 nt, synthetic construct
  source 1..20: mol_type = other RNA
tgaaaatctcttaattgacc

SEQ ID NO: 7126 - RNA, 20 nt, synthetic construct
  source 1..20: mol_type = other RNA
gaaaatctcttaattgacca

SEQ ID NO: 7127 - RNA, 20 nt, synthetic construct
  source 1..20: mol_type = other RNA
aaaatctcttaattgaccat

SEQ ID NO: 7128 - RNA, 20 nt, synthetic construct
  source 1..20: mol_type = other RNA
tgccatgaagatcttagata

SEQ ID NO: 7129 - RNA, 20 nt, synthetic construct
  source 1..20: mol_type = other RNA
catgaagatcttagataagc

SEQ ID NO: 7130 - RNA, 20 nt, synthetic construct
  source 1..20: mol_type = other RNA
gccatgaagatcttagataa

SEQ ID NO: 7131 - RNA, 20 nt, synthetic construct
  source 1..20: mol_type = other RNA
ccatgaagatcttagataag

SEQ ID NO: 7132 - RNA, 20 nt, synthetic construct
  source 1..20: mol_type = other RNA
atgaagatcttagataagca

SEQ ID NO: 7133 - RNA, 20 nt, synthetic construct
  source 1..20: mol_type = other RNA
tgaagatcttagataagcag

SEQ ID NO: 7134 - RNA, 20 nt, synthetic construct
  source 1..20: mol_type = other RNA
cggacttcggtttcgccaag

SEQ ID NO: 7135 - RNA, 20 nt, synthetic construct
  source 1..20: mol_type = other RNA
gacggacttcggtttcgcca

SEQ ID NO: 7136 - RNA, 20 nt, synthetic construct
  source 1..20: mol_type = other RNA
acggacttcggtttcgccaa

SEQ ID NO: 7137 - RNA, 20 nt, synthetic construct
  source 1..20: mol_type = other RNA
tgacggacttcggtttcgcc

SEQ ID NO: 7138 - RNA, 20 nt, synthetic construct
  source 1..20: mol_type = other RNA
gtgacggacttcggtttcgc

SEQ ID NO: 7139 - RNA, 20 nt, synthetic construct
  source 1..20: mol_type = other RNA
gcgacctgaagcccgagaat

SEQ ID NO: 7140 - RNA, 20 nt, synthetic construct
  source 1..20: mol_type = other RNA
cgcgacctgaagcccgagaa

SEQ ID NO: 7141 - RNA, 20 nt, synthetic construct
  source 1..20: mol_type = other RNA
ccgcgacctgaagcccgaga

SEQ ID NO: 7142 - RNA, 20 nt, synthetic construct
  source 1..20: mol_type = other RNA
accgcgacctgaagcccgag

SEQ ID NO: 7143 - RNA, 20 nt, synthetic construct
  source 1..20: mol_type = other RNA
caccgcgacctgaagcccga

SEQ ID NO: 7144 - RNA, 20 nt, synthetic construct
  source 1..20: mol_type = other RNA
cgagaatctcctcatcgacc

SEQ ID NO: 7145 - RNA, 20 nt, synthetic construct
  source 1..20: mol_type = other RNA
agaatctcctcatcgaccag

SEQ ID NO: 7146 - RNA, 20 nt, synthetic construct
  source 1..20: mol_type = other RNA
gagaatctcctcatcgacca

SEQ ID NO: 7147 - RNA, 20 nt, synthetic construct
  source 1..20: mol_type = other RNA
ccgagaatctcctcatcgac

SEQ ID NO: 7148 - RNA, 20 nt, synthetic construct
  source 1..20: mol_type = other RNA
cccgagaatctcctcatcga

SEQ ID NO: 7149 - RNA, 20 nt, synthetic construct
  source 1..20: mol_type = other RNA
gcccgagaatctcctcatcg

SEQ ID NO: 7150 - RNA, 20 nt, synthetic construct
  source 1..20: mol_type = other RNA
catgaagatcctcaacaagc

SEQ ID NO: 7151 - RNA, 20 nt, synthetic construct
  source 1..20: mol_type = other RNA
cgccatgaagatcctcaaca

SEQ ID NO: 7152 - RNA, 20 nt, synthetic construct
  source 1..20: mol_type = other RNA
tgaagatcctcaacaagcag

SEQ ID NO: 7153 - RNA, 20 nt, synthetic construct
  source 1..20: mol_type = other RNA
atgaagatcctcaacaagca

SEQ ID NO: 7154 - RNA, 20 nt, synthetic construct
  source 1..20: mol_type = other RNA
ccatgaagatcctcaacaag

SEQ ID NO: 7155 - RNA, 20 nt, synthetic construct
  source 1..20: mol_type = other RNA
gccatgaagatcctcaacaa

SEQ ID NO: 7156 - RNA, 20 nt, synthetic construct
  source 1..20: mol_type = other RNA
tgctgactttgggatgtgca

SEQ ID NO: 7157 - RNA, 20 nt, synthetic construct
  source 1..20: mol_type = other RNA
gctgactttgggatgtgcaa

SEQ ID NO: 7158 - RNA, 20 nt, synthetic construct
  source 1..20: mol_type = other RNA
attgctgactttgggatgtg

SEQ ID NO: 7159 - RNA, 20 nt, synthetic construct
  source 1..20: mol_type = other RNA
ttgctgactttgggatgtgc

SEQ ID NO: 7160 - RNA, 20 nt, synthetic construct
  source 1..20: mol_type = other RNA
ctgactttgggatgtgcaag

SEQ ID NO: 7161 - RNA, 20 nt, synthetic construct
  source 1..20: mol_type = other RNA
agggatctgaagttagataa

SEQ ID NO: 7162 - RNA, 20 nt, synthetic construct
  source 1..20: mol_type = other RNA
tgcagggatctgaagttaga

SEQ ID NO: 7163 - RNA, 20 nt, synthetic construct
  source 1..20: mol_type = other RNA
gcagggatctgaagttagat

SEQ ID NO: 7164 - RNA, 20 nt, synthetic construct
  source 1..20: mol_type = other RNA
cagggatctgaagttagata

SEQ ID NO: 7165 - RNA, 20 nt, synthetic construct
  source 1..20: mol_type = other RNA
gggatctgaagttagataac

SEQ ID NO: 7166 - RNA, 20 nt, synthetic construct
  source 1..20: mol_type = other RNA
gataacgtcatgttggattc

SEQ ID NO: 7167 - RNA, 20 nt, synthetic construct
  source 1..20: mol_type = other RNA
gttagataacgtcatgttgg

SEQ ID NO: 7168 - RNA, 20 nt, synthetic construct
  source 1..20: mol_type = other RNA
ttagataacgtcatgttgga

SEQ ID NO: 7169 - RNA, 20 nt, synthetic construct
  source 1..20: mol_type = other RNA
tagataacgtcatgttggat

SEQ ID NO: 7170 - RNA, 20 nt, synthetic construct
  source 1..20: mol_type = other RNA
agataacgtcatgttggatt

SEQ ID NO: 7171 - RNA, 20 nt, synthetic construct
  source 1..20: mol_type = other RNA
ataacgtcatgttggattca

SEQ ID NO: 7172 - RNA, 20 nt, synthetic construct
  source 1..20: mol_type = other RNA
tgcaatcaaaatcctgaaga

SEQ ID NO: 7173 - RNA, 20 nt, synthetic construct
  source 1..20: mol_type = other RNA
gcaatcaaaatcctgaagaa

SEQ ID NO: 7174 - RNA, 20 nt, synthetic construct
  source 1..20: mol_type = other RNA
atcaaaatcctgaagaagga

SEQ ID NO: 7175 - RNA, 20 nt, synthetic construct
  source 1..20: mol_type = other RNA
caaaatcctgaagaaggatg

SEQ ID NO: 7176 - RNA, 20 nt, synthetic construct
  source 1..20: mol_type = other RNA
caatcaaaatcctgaagaag

SEQ ID NO: 7177 - RNA, 20 nt, synthetic construct
  source 1..20: mol_type = other RNA
aatcaaaatcctgaagaagg

SEQ ID NO: 7178 - RNA, 20 nt, synthetic construct
  source 1..20: mol_type = other RNA
tcaaaatcctgaagaaggat

SEQ ID NO: 7179 - RNA, 20 nt, synthetic construct
  source 1..20: mol_type = other RNA
agtgacctaaaacttgacaa

SEQ ID NO: 7180 - RNA, 20 nt, synthetic construct
  source 1..20: mol_type = other RNA
catagtgacctaaaacttga

SEQ ID NO: 7181 - RNA, 20 nt, synthetic construct
  source 1..20: mol_type = other RNA
atagtgacctaaaacttgac

SEQ ID NO: 7182 - RNA, 20 nt, synthetic construct
  source 1..20: mol_type = other RNA
tagtgacctaaaacttgaca

SEQ ID NO: 7183 - RNA, 20 nt, synthetic construct
  source 1..20: mol_type = other RNA
gtgacctaaaacttgacaac

SEQ ID NO: 7184 - RNA, 20 nt, synthetic construct
  source 1..20: mol_type = other RNA
gacaacgtgatgctcgattc

SEQ ID NO: 7185 - RNA, 20 nt, synthetic construct
  source 1..20: mol_type = other RNA
acttgacaacgtgatgctcg

SEQ ID NO: 7186 - RNA, 20 nt, synthetic construct
  source 1..20: mol_type = other RNA
cttgacaacgtgatgctcga

SEQ ID NO: 7187 - RNA, 20 nt, synthetic construct
  source 1..20: mol_type = other RNA
ttgacaacgtgatgctcgat

SEQ ID NO: 7188 - RNA, 20 nt, synthetic construct
  source 1..20: mol_type = other RNA
tgacaacgtgatgctcgatt

SEQ ID NO: 7189 - RNA, 20 nt, synthetic construct
  source 1..20: mol_type = other RNA
acaacgtgatgctcgattct

SEQ ID NO: 7190 - RNA, 20 nt, synthetic construct
  source 1..20: mol_type = other RNA
tgctgtgaagatcctgaaga

SEQ ID NO: 7191 - RNA, 20 nt, synthetic construct
  source 1..20: mol_type = other RNA
gctgtgaagatcctgaagaa

SEQ ID NO: 7192 - RNA, 20 nt, synthetic construct
  source 1..20: mol_type = other RNA
gtgaagatcctgaagaagga

SEQ ID NO: 7193 - RNA, 20 nt, synthetic construct
  source 1..20: mol_type = other RNA
ctgtgaagatcctgaagaag

SEQ ID NO: 7194 - RNA, 20 nt, synthetic construct
  source 1..20: mol_type = other RNA
tgtgaagatcctgaagaagg

SEQ ID NO: 7195 - RNA, 20 nt, synthetic construct
  source 1..20: mol_type = other RNA
tgaagatcctgaagaaggac

SEQ ID NO: 7196 - RNA, 20 nt, synthetic construct
  source 1..20: mol_type = other RNA
gccgactttgggatgtgcaa

SEQ ID NO: 7197 - RNA, 20 nt, synthetic construct
  source 1..20: mol_type = other RNA
attgccgactttgggatgtg

SEQ ID NO: 7198 - RNA, 20 nt, synthetic construct
  source 1..20: mol_type = other RNA
ttgccgactttgggatgtgc

SEQ ID NO: 7199 - RNA, 20 nt, synthetic construct
  source 1..20: mol_type = other RNA
tgccgactttgggatgtgca

SEQ ID NO: 7200 - RNA, 20 nt, synthetic construct
  source 1..20: mol_type = other RNA
ccgactttgggatgtgcaaa

SEQ ID NO: 7201 - RNA, 20 nt, synthetic construct
  source 1..20: mol_type = other RNA
agggacctcaaactggacaa

SEQ ID NO: 7202 - RNA, 20 nt, synthetic construct
  source 1..20: mol_type = other RNA
cttagggacctcaaactgga

SEQ ID NO: 7203 - RNA, 20 nt, synthetic construct
  source 1..20: mol_type = other RNA
ttagggacctcaaactggac

SEQ ID NO: 7204 - RNA, 20 nt, synthetic construct
  source 1..20: mol_type = other RNA
tagggacctcaaactggaca

SEQ ID NO: 7205 - RNA, 20 nt, synthetic construct
  source 1..20: mol_type = other RNA
gggacctcaaactggacaat

SEQ ID NO: 7206 - RNA, 20 nt, synthetic construct
  source 1..20: mol_type = other RNA
tggacaatgtgctgctggac

SEQ ID NO: 7207 - RNA, 20 nt, synthetic construct
  source 1..20: mol_type = other RNA
ggacaatgtgctgctggacc

SEQ ID NO: 7208 - RNA, 20 nt, synthetic construct
  source 1..20: mol_type = other RNA
gacaatgtgctgctggaccg

SEQ ID NO: 7209 - RNA, 20 nt, synthetic construct
  source 1..20: mol_type = other RNA
actggacaatgtgctgctgg

SEQ ID NO: 7210 - RNA, 20 nt, synthetic construct
  source 1..20: mol_type = other RNA
ctggacaatgtgctgctgga

SEQ ID NO: 7211 - RNA, 20 nt, synthetic construct
  source 1..20: mol_type = other RNA
acaatgtgctgctggaccgg

SEQ ID NO: 7212 - RNA, 20 nt, synthetic construct
  source 1..20: mol_type = other RNA
tgccatcaaggccctcaaga

SEQ ID NO: 7213 - RNA, 20 nt, synthetic construct
  source 1..20: mol_type = other RNA
gccatcaaggccctcaagaa

SEQ ID NO: 7214 - RNA, 20 nt, synthetic construct
  source 1..20: mol_type = other RNA
atcaaggccctcaagaagga

SEQ ID NO: 7215 - RNA, 20 nt, synthetic construct
  source 1..20: mol_type = other RNA
ccatcaaggccctcaagaag

SEQ ID NO: 7216 - RNA, 20 nt, synthetic construct
  source 1..20: mol_type = other RNA
catcaaggccctcaagaagg

SEQ ID NO: 7217 - RNA, 20 nt, synthetic construct
  source 1..20: mol_type = other RNA
tcaaggccctcaagaaggat

SEQ ID NO: 7218 - RNA, 20 nt, synthetic construct
  source 1..20: mol_type = other RNA
ggctgacttcgggatgtgca

SEQ ID NO: 7219 - RNA, 20 nt, synthetic construct
  source 1..20: mol_type = other RNA
gctgacttcgggatgtgcaa

SEQ ID NO: 7220 - RNA, 20 nt, synthetic construct
  source 1..20: mol_type = other RNA
ctggctgacttcgggatgtg

SEQ ID NO: 7221 - RNA, 20 nt, synthetic construct
  source 1..20: mol_type = other RNA
tggctgacttcgggatgtgc

SEQ ID NO: 7222 - RNA, 20 nt, synthetic construct
  source 1..20: mol_type = other RNA
ctgacttcgggatgtgcaag

SEQ ID NO: 7223 - RNA, 20 nt, synthetic construct
  source 1..20: mol_type = other RNA
tgcagggatttgaaactgga

SEQ ID NO: 7224 - RNA, 20 nt, synthetic construct
  source 1..20: mol_type = other RNA
gcagggatttgaaactggac

SEQ ID NO: 7225 - RNA, 20 nt, synthetic construct
  source 1..20: mol_type = other RNA
cagggatttgaaactggaca

SEQ ID NO: 7226 - RNA, 20 nt, synthetic construct
  source 1..20: mol_type = other RNA
agggatttgaaactggacaa

SEQ ID NO: 7227 - RNA, 20 nt, synthetic construct
  source 1..20: mol_type = other RNA
gggatttgaaactggacaac

SEQ ID NO: 7228 - RNA, 20 nt, synthetic construct
  source 1..20: mol_type = other RNA
ctggacaacatccttctgga

SEQ ID NO: 7229 - RNA, 20 nt, synthetic construct
  source 1..20: mol_type = other RNA
gacaacatccttctggatgc

SEQ ID NO: 7230 - RNA, 20 nt, synthetic construct
  source 1..20: mol_type = other RNA
actggacaacatccttctgg

SEQ ID NO: 7231 - RNA, 20 nt, synthetic construct
  source 1..20: mol_type = other RNA
tggacaacatccttctggat

SEQ ID NO: 7232 - RNA, 20 nt, synthetic construct
  source 1..20: mol_type = other RNA
ggacaacatccttctggatg

SEQ ID NO: 7233 - RNA, 20 nt, synthetic construct
  source 1..20: mol_type = other RNA
acaacatccttctggatgca

SEQ ID NO: 7234 - RNA, 20 nt, synthetic construct
  source 1..20: mol_type = other RNA
tgctgtgaaggtcttaaaga

SEQ ID NO: 7235 - RNA, 20 nt, synthetic construct
  source 1..20: mol_type = other RNA
gctgtgaaggtcttaaagaa

SEQ ID NO: 7236 - RNA, 20 nt, synthetic construct
  source 1..20: mol_type = other RNA
gtgaaggtcttaaagaagga

SEQ ID NO: 7237 - RNA, 20 nt, synthetic construct
  source 1..20: mol_type = other RNA
ctgtgaaggtcttaaagaag

SEQ ID NO: 7238 - RNA, 20 nt, synthetic construct
  source 1..20: mol_type = other RNA
tgtgaaggtcttaaagaagg

SEQ ID NO: 7239 - RNA, 20 nt, synthetic construct
  source 1..20: mol_type = other RNA
tgaaggtcttaaagaaggac

SEQ ID NO: 7240 - RNA, 20 nt, synthetic construct
  source 1..20: mol_type = other RNA
cactgactttggcatgtgta

SEQ ID NO: 7241 - RNA, 20 nt, synthetic construct
  source 1..20: mol_type = other RNA
actgactttggcatgtgtaa

SEQ ID NO: 7242 - RNA, 20 nt, synthetic construct
  source 1..20: mol_type = other RNA
atcactgactttggcatgtg

SEQ ID NO: 7243 - RNA, 20 nt, synthetic construct
  source 1..20: mol_type = other RNA
tcactgactttggcatgtgt

SEQ ID NO: 7244 - RNA, 20 nt, synthetic construct
  source 1..20: mol_type = other RNA
ctgactttggcatgtgtaag

SEQ ID NO: 7245 - RNA, 20 nt, synthetic construct
  source 1..20: mol_type = other RNA
tccagggacctgaagctgga

SEQ ID NO: 7246 - RNA, 20 nt, synthetic construct
  source 1..20: mol_type = other RNA
ccagggacctgaagctggac

SEQ ID NO: 7247 - RNA, 20 nt, synthetic construct
  source 1..20: mol_type = other RNA
gggacctgaagctggacaat

SEQ ID NO: 7248 - RNA, 20 nt, synthetic construct
  source 1..20: mol_type = other RNA
agggacctgaagctggacaa

SEQ ID NO: 7249 - RNA, 20 nt, synthetic construct
  source 1..20: mol_type = other RNA
cagggacctgaagctggaca

SEQ ID NO: 7250 - RNA, 20 nt, synthetic construct
  source 1..20: mol_type = other RNA
ctggacaatgtgatgctgga

SEQ ID NO: 7251 - RNA, 20 nt, synthetic construct
  source 1..20: mol_type = other RNA
gacaatgtgatgctggatgc

SEQ ID NO: 7252 - RNA, 20 nt, synthetic construct
  source 1..20: mol_type = other RNA
gctggacaatgtgatgctgg

SEQ ID NO: 7253 - RNA, 20 nt, synthetic construct
  source 1..20: mol_type = other RNA
tggacaatgtgatgctggat

SEQ ID NO: 7254 - RNA, 20 nt, synthetic construct
  source 1..20: mol_type = other RNA
ggacaatgtgatgctggatg

SEQ ID NO: 7255 - RNA, 20 nt, synthetic construct
  source 1..20: mol_type = other RNA
acaatgtgatgctggatgct

SEQ ID NO: 7256 - RNA, 20 nt, synthetic construct
  source 1..20: mol_type = other RNA
cgccatcaagatcttgaaaa

SEQ ID NO: 7257 - RNA, 20 nt, synthetic construct
  source 1..20: mol_type = other RNA
ggcagacttcggaatgtgca

SEQ ID NO: 7258 - RNA, 20 nt, synthetic construct
  source 1..20: mol_type = other RNA
gcagacttcggaatgtgcaa

SEQ ID NO: 7259 - RNA, 20 nt, synthetic construct
  source 1..20: mol_type = other RNA
ctggcagacttcggaatgtg

SEQ ID NO: 7260 - RNA, 20 nt, synthetic construct
  source 1..20: mol_type = other RNA
tggcagacttcggaatgtgc

SEQ ID NO: 7261 - RNA, 20 nt, synthetic construct
  source 1..20: mol_type = other RNA
cagacttcggaatgtgcaag

SEQ ID NO: 7262 - RNA, 20 nt, synthetic construct
  source 1..20: mol_type = other RNA
agagatctgaaactggacaa

SEQ ID NO: 7263 - RNA, 20 nt, synthetic construct
  source 1..20: mol_type = other RNA
ttcagagatctgaaactgga

SEQ ID NO: 7264 - RNA, 20 nt, synthetic construct
  source 1..20: mol_type = other RNA
tcagagatctgaaactggac

SEQ ID NO: 7265 - RNA, 20 nt, synthetic construct
  source 1..20: mol_type = other RNA
cagagatctgaaactggaca

SEQ ID NO: 7266 - RNA, 20 nt, synthetic construct
  source 1..20: mol_type = other RNA
gagatctgaaactggacaat

SEQ ID NO: 7267 - RNA, 20 nt, synthetic construct
  source 1..20: mol_type = other RNA
gacaatgtcctgttggacca

SEQ ID NO: 7268 - RNA, 20 nt, synthetic construct
  source 1..20: mol_type = other RNA
actggacaatgtcctgttgg

SEQ ID NO: 7269 - RNA, 20 nt, synthetic construct
  source 1..20: mol_type = other RNA
ctggacaatgtcctgttgga

SEQ ID NO: 7270 - RNA, 20 nt, synthetic construct
  source 1..20: mol_type = other RNA
tggacaatgtcctgttggac

SEQ ID NO: 7271 - RNA, 20 nt, synthetic construct
  source 1..20: mol_type = other RNA
ggacaatgtcctgttggacc

SEQ ID NO: 7272 - RNA, 20 nt, synthetic construct
  source 1..20: mol_type = other RNA
acaatgtcctgttggaccac

SEQ ID NO: 7273 - RNA, 20 nt, synthetic construct
  source 1..20: mol_type = other RNA
tgctgtgaaggtgctgaaga

SEQ ID NO: 7274 - RNA, 20 nt, synthetic construct
  source 1..20: mol_type = other RNA
gctgtgaaggtgctgaagaa

SEQ ID NO: 7275 - RNA, 20 nt, synthetic construct
  source 1..20: mol_type = other RNA
gtgaaggtgctgaagaagga

SEQ ID NO: 7276 - RNA, 20 nt, synthetic construct
  source 1..20: mol_type = other RNA
ctgtgaaggtgctgaagaag

SEQ ID NO: 7277 - RNA, 20 nt, synthetic construct
  source 1..20: mol_type = other RNA
tgtgaaggtgctgaagaagg

SEQ ID NO: 7278 - RNA, 20 nt, synthetic construct
  source 1..20: mol_type = other RNA
tgaaggtgctgaagaaggac

SEQ ID NO: 7279 - RNA, 20 nt, synthetic construct
  source 1..20: mol_type = other RNA
cactgactacggcatgtgta

SEQ ID NO: 7280 - RNA, 20 nt, synthetic construct
  source 1..20: mol_type = other RNA
actgactacggcatgtgtaa

SEQ ID NO: 7281 - RNA, 20 nt, synthetic construct
  source 1..20: mol_type = other RNA
ctcactgactacggcatgtg

SEQ ID NO: 7282 - RNA, 20 nt, synthetic construct
  source 1..20: mol_type = other RNA
tcactgactacggcatgtgt

SEQ ID NO: 7283 - RNA, 20 nt, synthetic construct
  source 1..20: mol_type = other RNA
ctgactacggcatgtgtaag

SEQ ID NO: 7284 - RNA, 20 nt, synthetic construct
  source 1..20: mol_type = other RNA
agagatttgaaactggacaa

SEQ ID NO: 7285 - RNA, 20 nt, synthetic construct
  source 1..20: mol_type = other RNA
tatagagatttgaaactgga

SEQ ID NO: 7286 - RNA, 20 nt, synthetic construct
  source 1..20: mol_type = other RNA
atagagatttgaaactggac

SEQ ID NO: 7287 - RNA, 20 nt, synthetic construct
  source 1..20: mol_type = other RNA
tagagatttgaaactggaca

SEQ ID NO: 7288 - RNA, 20 nt, synthetic construct
  source 1..20: mol_type = other RNA
gagatttgaaactggacaat

SEQ ID NO: 7289 - RNA, 20 nt, synthetic construct
  source 1..20: mol_type = other RNA
gacaatgtattactggactc

SEQ ID NO: 7290 - RNA, 20 nt, synthetic construct
  source 1..20: mol_type = other RNA
actggacaatgtattactgg

SEQ ID NO: 7291 - RNA, 20 nt, synthetic construct
  source 1..20: mol_type = other RNA
ctggacaatgtattactgga

SEQ ID NO: 7292 - RNA, 20 nt, synthetic construct
  source 1..20: mol_type = other RNA
tggacaatgtattactggac

SEQ ID NO: 7293 - RNA, 20 nt, synthetic construct
  source 1..20: mol_type = other RNA
ggacaatgtattactggact

SEQ ID NO: 7294 - RNA, 20 nt, synthetic construct
  source 1..20: mol_type = other RNA
acaatgtattactggactct

SEQ ID NO: 7295 - RNA, 20 nt, synthetic construct
  source 1..20: mol_type = other RNA
tgcaatgaaagttgtgaaaa

SEQ ID NO: 7296 - RNA, 20 nt, synthetic construct
  source 1..20: mol_type = other RNA
gggacctgaagctagataac

SEQ ID NO: 7297 - RNA, 20 nt, synthetic construct
  source 1..20: mol_type = other RNA
agggacctgaagctagataa

SEQ ID NO: 7298 - RNA, 20 nt, synthetic construct
  source 1..20: mol_type = other RNA
cagggacctgaagctagata

SEQ ID NO: 7299 - RNA, 20 nt, synthetic construct
  source 1..20: mol_type = other RNA
tcagggacctgaagctagat

SEQ ID NO: 7300 - RNA, 20 nt, synthetic construct
  source 1..20: mol_type = other RNA
ttcagggacctgaagctaga

SEQ ID NO: 7301 - RNA, 20 nt, synthetic construct
  source 1..20: mol_type = other RNA
gataacatcctgttagacaa

SEQ ID NO: 7302 - RNA, 20 nt, synthetic construct
  source 1..20: mol_type = other RNA
ataacatcctgttagacaaa

SEQ ID NO: 7303 - RNA, 20 nt, synthetic construct
  source 1..20: mol_type = other RNA
agataacatcctgttagaca

SEQ ID NO: 7304 - RNA, 20 nt, synthetic construct
  source 1..20: mol_type = other RNA
tagataacatcctgttagac

SEQ ID NO: 7305 - RNA, 20 nt, synthetic construct
  source 1..20: mol_type = other RNA
ctagataacatcctgttaga

SEQ ID NO: 7306 - RNA, 20 nt, synthetic construct
  source 1..20: mol_type = other RNA
gctagataacatcctgttag

SEQ ID NO: 7307 - RNA, 20 nt, synthetic construct
  source 1..20: mol_type = other RNA
ataaaggccttaaagaaaga

SEQ ID NO: 7308 - RNA, 20 nt, synthetic construct
  source 1..20: mol_type = other RNA
gcaataaaggccttaaagaa

SEQ ID NO: 7309 - RNA, 20 nt, synthetic construct
  source 1..20: mol_type = other RNA
taaaggccttaaagaaagat

SEQ ID NO: 7310 - RNA, 20 nt, synthetic construct
  source 1..20: mol_type = other RNA
aataaaggccttaaagaaag

SEQ ID NO: 7311 - RNA, 20 nt, synthetic construct
  source 1..20: mol_type = other RNA
caataaaggccttaaagaaa

SEQ ID NO: 7312 - RNA, 20 nt, synthetic construct
  source 1..20: mol_type = other RNA
cgcaataaaggccttaaaga

SEQ ID NO: 7313 - RNA, 20 nt, synthetic construct
  source 1..20: mol_type = other RNA
cacagactacggcatgtgca

SEQ ID NO: 7314 - RNA, 20 nt, synthetic construct
  source 1..20: mol_type = other RNA
acagactacggcatgtgcaa

SEQ ID NO: 7315 - RNA, 20 nt, synthetic construct
  source 1..20: mol_type = other RNA
ctcacagactacggcatgtg

SEQ ID NO: 7316 - RNA, 20 nt, synthetic construct
  source 1..20: mol_type = other RNA
tcacagactacggcatgtgc

SEQ ID NO: 7317 - RNA, 20 nt, synthetic construct
  source 1..20: mol_type = other RNA
cagactacggcatgtgcaag

SEQ ID NO: 7318 - RNA, 20 nt, synthetic construct
  source 1..20: mol_type = other RNA
tacagggacctgaagctgga

SEQ ID NO: 7319 - RNA, 20 nt, synthetic construct
  source 1..20: mol_type = other RNA
acagggacctgaagctggac

SEQ ID NO: 7320 - RNA, 20 nt, synthetic construct
  source 1..20: mol_type = other RNA
gggacctgaagctggacaac

SEQ ID NO: 7321 - RNA, 20 nt, synthetic construct
  source 1..20: mol_type = other RNA
ctggacaacgtcctcctgga

SEQ ID NO: 7322 - RNA, 20 nt, synthetic construct
  source 1..20: mol_type = other RNA
ggacaacgtcctcctggatg

SEQ ID NO: 7323 - RNA, 20 nt, synthetic construct
  source 1..20: mol_type = other RNA
gacaacgtcctcctggatgc

SEQ ID NO: 7324 - RNA, 20 nt, synthetic construct
  source 1..20: mol_type = other RNA
gctggacaacgtcctcctgg

SEQ ID NO: 7325 - RNA, 20 nt, synthetic construct
  source 1..20: mol_type = other RNA
tggacaacgtcctcctggat

SEQ ID NO: 7326 - RNA, 20 nt, synthetic construct
  source 1..20: mol_type = other RNA
acaacgtcctcctggatgcg

SEQ ID NO: 7327 - RNA, 20 nt, synthetic construct
  source 1..20: mol_type = other RNA
gccatgaaagtggtgaagaa

SEQ ID NO: 7328 - RNA, 20 nt, synthetic construct
  source 1..20: mol_type = other RNA
catgaaagtggtgaagaaag

SEQ ID NO: 7329 - RNA, 20 nt, synthetic construct
  source 1..20: mol_type = other RNA
gaaagtggtgaagaaagagc

SEQ ID NO: 7330 - RNA, 20 nt, synthetic construct
  source 1..20: mol_type = other RNA
cgccatgaaagtggtgaaga

SEQ ID NO: 7331 - RNA, 20 nt, synthetic construct
  source 1..20: mol_type = other RNA
ccatgaaagtggtgaagaaa

SEQ ID NO: 7332 - RNA, 20 nt, synthetic construct
  source 1..20: mol_type = other RNA
atgaaagtggtgaagaaaga

SEQ ID NO: 7333 - RNA, 20 nt, synthetic construct
  source 1..20: mol_type = other RNA
tgaaagtggtgaagaaagag

SEQ ID NO: 7334 - RNA, 20 nt, synthetic construct
  source 1..20: mol_type = other RNA
tgtgacctcaaaccagaaaa

SEQ ID NO: 7335 - RNA, 20 nt, synthetic construct
  source 1..20: mol_type = other RNA
gtgacctcaaaccagaaaat

SEQ ID NO: 7336 - RNA, 20 nt, synthetic construct
  source 1..20: mol_type = other RNA
ctgtgacctcaaaccagaaa

SEQ ID NO: 7337 - RNA, 20 nt, synthetic construct
  source 1..20: mol_type = other RNA
actgtgacctcaaaccagaa

SEQ ID NO: 7338 - RNA, 20 nt, synthetic construct
  source 1..20: mol_type = other RNA
cactgtgacctcaaaccaga

SEQ ID NO: 7339 - RNA, 20 nt, synthetic construct
  source 1..20: mol_type = other RNA
gaaaatgtgttgctagcctc

SEQ ID NO: 7340 - RNA, 20 nt, synthetic construct
  source 1..20: mol_type = other RNA
aaaatgtgttgctagcctca

SEQ ID NO: 7341 - RNA, 20 nt, synthetic construct
  source 1..20: mol_type = other RNA
agaaaatgtgttgctagcct

SEQ ID NO: 7342 - RNA, 20 nt, synthetic construct
  source 1..20: mol_type = other RNA
cagaaaatgtgttgctagcc

SEQ ID NO: 7343 - RNA, 20 nt, synthetic construct
  source 1..20: mol_type = other RNA
ccagaaaatgtgttgctagc

SEQ ID NO: 7344 - RNA, 20 nt, synthetic construct
  source 1..20: mol_type = other RNA
accagaaaatgtgttgctag

SEQ ID NO: 7345 - RNA, 20 nt, synthetic construct
  source 1..20: mol_type = other RNA
ttaaaatcattgacaaatta

SEQ ID NO: 7346 - RNA, 20 nt, synthetic construct
  source 1..20: mol_type = other RNA
taaaatcattgacaaattac

SEQ ID NO: 7347 - RNA, 20 nt, synthetic construct
  source 1..20: mol_type = other RNA
attaaaatcattgacaaatt

SEQ ID NO: 7348 - RNA, 20 nt, synthetic construct
  source 1..20: mol_type = other RNA
tattaaaatcattgacaaat

SEQ ID NO: 7349 - RNA, 20 nt, synthetic construct
  source 1..20: mol_type = other RNA
ctattaaaatcattgacaaa

SEQ ID NO: 7350 - RNA, 20 nt, synthetic construct
  source 1..20: mol_type = other RNA
gctattaaaatcattgacaa

SEQ ID NO: 7351 - RNA, 20 nt, synthetic construct
  source 1..20: mol_type = other RNA
agctattaaaatcattgaca

SEQ ID NO: 7352 - RNA, 20 nt, synthetic construct
  source 1..20: mol_type = other RNA
tgtgtgactttggctttgct

SEQ ID NO: 7353 - RNA, 20 nt, synthetic construct
  source 1..20: mol_type = other RNA
gtgactttggctttgctcgc

SEQ ID NO: 7354 - RNA, 20 nt, synthetic construct
  source 1..20: mol_type = other RNA
tgtgactttggctttgctcg

SEQ ID NO: 7355 - RNA, 20 nt, synthetic construct
  source 1..20: mol_type = other RNA
gtgtgactttggctttgctc

SEQ ID NO: 7356 - RNA, 20 nt, synthetic construct
  source 1..20: mol_type = other RNA
ctgtgtgactttggctttgc

SEQ ID NO: 7357 - RNA, 20 nt, synthetic construct
  source 1..20: mol_type = other RNA
tgtgacttgaaaccagaaaa

SEQ ID NO: 7358 - RNA, 20 nt, synthetic construct
  source 1..20: mol_type = other RNA
gtgacttgaaaccagaaaac

SEQ ID NO: 7359 - RNA, 20 nt, synthetic construct
  source 1..20: mol_type = other RNA
ctgtgacttgaaaccagaaa

SEQ ID NO: 7360 - RNA, 20 nt, synthetic construct
  source 1..20: mol_type = other RNA
actgtgacttgaaaccagaa

SEQ ID NO: 7361 - RNA, 20 nt, synthetic construct
  source 1..20: mol_type = other RNA
cactgtgacttgaaaccaga

SEQ ID NO: 7362 - RNA, 20 nt, synthetic construct
  source 1..20: mol_type = other RNA
gaaaacgtgttgctggcatc

SEQ ID NO: 7363 - RNA, 20 nt, synthetic construct
  source 1..20: mol_type = other RNA
aaaacgtgttgctggcatca

SEQ ID NO: 7364 - RNA, 20 nt, synthetic construct
  source 1..20: mol_type = other RNA
agaaaacgtgttgctggcat

SEQ ID NO: 7365 - RNA, 20 nt, synthetic construct
  source 1..20: mol_type = other RNA
cagaaaacgtgttgctggca

SEQ ID NO: 7366 - RNA, 20 nt, synthetic construct
  source 1..20: mol_type = other RNA
ccagaaaacgtgttgctggc

SEQ ID NO: 7367 - RNA, 20 nt, synthetic construct
  source 1..20: mol_type = other RNA
accagaaaacgtgttgctgg

SEQ ID NO: 7368 - RNA, 20 nt, synthetic construct
  source 1..20: mol_type = other RNA
ttaaggtcattgacaaactg

SEQ ID NO: 7369 - RNA, 20 nt, synthetic construct
  source 1..20: mol_type = other RNA
agttaaggtcattgacaaac

SEQ ID NO: 7370 - RNA, 20 nt, synthetic construct
  source 1..20: mol_type = other RNA
gttaaggtcattgacaaact

SEQ ID NO: 7371 - RNA, 20 nt, synthetic construct
  source 1..20: mol_type = other RNA
cagttaaggtcattgacaaa

SEQ ID NO: 7372 - RNA, 20 nt, synthetic construct
  source 1..20: mol_type = other RNA
gcagttaaggtcattgacaa

SEQ ID NO: 7373 - RNA, 20 nt, synthetic construct
  source 1..20: mol_type = other RNA
ggcagttaaggtcattgaca

SEQ ID NO: 7374 - RNA, 20 nt, synthetic construct
  source 1..20: mol_type = other RNA
tgtgtgactttggatttgca

SEQ ID NO: 7375 - RNA, 20 nt, synthetic construct
  source 1..20: mol_type = other RNA
gtgactttggatttgcacgc

SEQ ID NO: 7376 - RNA, 20 nt, synthetic construct
  source 1..20: mol_type = other RNA
tgtgactttggatttgcacg

SEQ ID NO: 7377 - RNA, 20 nt, synthetic construct
  source 1..20: mol_type = other RNA
gtgtgactttggatttgcac

SEQ ID NO: 7378 - RNA, 20 nt, synthetic construct
  source 1..20: mol_type = other RNA
ctgtgtgactttggatttgc

SEQ ID NO: 7379 - RNA, 20 nt, synthetic construct
  source 1..20: mol_type = other RNA
tgtgatttaaagccagaaaa

SEQ ID NO: 7380 - RNA, 20 nt, synthetic construct
  source 1..20: mol_type = other RNA
gtgatttaaagccagaaaat

SEQ ID NO: 7381 - RNA, 20 nt, synthetic construct
  source 1..20: mol_type = other RNA
ctgtgatttaaagccagaaa

SEQ ID NO: 7382 - RNA, 20 nt, synthetic construct
  source 1..20: mol_type = other RNA
actgtgatttaaagccagaa

SEQ ID NO: 7383 - RNA, 20 nt, synthetic construct
  source 1..20: mol_type = other RNA
cactgtgatttaaagccaga

SEQ ID NO: 7384 - RNA, 20 nt, synthetic construct
  source 1..20: mol_type = other RNA
gaaaatgtgctgcttgcatc

SEQ ID NO: 7385 - RNA, 20 nt, synthetic construct
  source 1..20: mol_type = other RNA
aaaatgtgctgcttgcatca

SEQ ID NO: 7386 - RNA, 20 nt, synthetic construct
  source 1..20: mol_type = other RNA
agaaaatgtgctgcttgcat

SEQ ID NO: 7387 - RNA, 20 nt, synthetic construct
  source 1..20: mol_type = other RNA
cagaaaatgtgctgcttgca

SEQ ID NO: 7388 - RNA, 20 nt, synthetic construct
  source 1..20: mol_type = other RNA
ccagaaaatgtgctgcttgc

SEQ ID NO: 7389 - RNA, 20 nt, synthetic construct
  source 1..20: mol_type = other RNA
gccagaaaatgtgctgcttg

SEQ ID NO: 7390 - RNA, 20 nt, synthetic construct
  source 1..20: mol_type = other RNA
ttaaagtaattgataagatg

SEQ ID NO: 7391 - RNA, 20 nt, synthetic construct
  source 1..20: mol_type = other RNA
tattaaagtaattgataaga

SEQ ID NO: 7392 - RNA, 20 nt, synthetic construct
  source 1..20: mol_type = other RNA
ggctattaaagtaattgata

SEQ ID NO: 7393 - RNA, 20 nt, synthetic construct
  source 1..20: mol_type = other RNA
taaagtaattgataagatga

SEQ ID NO: 7394 - RNA, 20 nt, synthetic construct
  source 1..20: mol_type = other RNA
attaaagtaattgataagat

SEQ ID NO: 7395 - RNA, 20 nt, synthetic construct
  source 1..20: mol_type = other RNA
ctattaaagtaattgataag

SEQ ID NO: 7396 - RNA, 20 nt, synthetic construct
  source 1..20: mol_type = other RNA
gctattaaagtaattgataa

SEQ ID NO: 7397 - RNA, 20 nt, synthetic construct
  source 1..20: mol_type = other RNA
tcgactttgggcatgcgttt

SEQ ID NO: 7398 - RNA, 20 nt, synthetic construct
  source 1..20: mol_type = other RNA
atcgactttgggcatgcgtt

SEQ ID NO: 7399 - RNA, 20 nt, synthetic construct
  source 1..20: mol_type = other RNA
gatcgactttgggcatgcgt

SEQ ID NO: 7400 - RNA, 20 nt, synthetic construct
  source 1..20: mol_type = other RNA
ggatcgactttgggcatgcg

SEQ ID NO: 7401 - RNA, 20 nt, synthetic construct
  source 1..20: mol_type = other RNA
gggatcgactttgggcatgc

SEQ ID NO: 7402 - RNA, 20 nt, synthetic construct
  source 1..20: mol_type = other RNA
gagacagacatctgaacaac

SEQ ID NO: 7403 - RNA, 20 nt, synthetic construct
  source 1..20: mol_type = other RNA
ggagacagacatctgaacaa

SEQ ID NO: 7404 - RNA, 20 nt, synthetic construct
  source 1..20: mol_type = other RNA
tggagacagacatctgaaca

SEQ ID NO: 7405 - RNA, 20 nt, synthetic construct
  source 1..20: mol_type = other RNA
ttggagacagacatctgaac

SEQ ID NO: 7406 - RNA, 20 nt, synthetic construct
  source 1..20: mol_type = other RNA
attggagacagacatctgaa

SEQ ID NO: 7407 - RNA, 20 nt, synthetic construct
  source 1..20: mol_type = other RNA
aacaactttatggtggccat

SEQ ID NO: 7408 - RNA, 20 nt, synthetic construct
  source 1..20: mol_type = other RNA
gaacaactttatggtggcca

SEQ ID NO: 7409 - RNA, 20 nt, synthetic construct
  source 1..20: mol_type = other RNA
acaactttatggtggccatg

SEQ ID NO: 7410 - RNA, 20 nt, synthetic construct
  source 1..20: mol_type = other RNA
tgaacaactttatggtggcc

SEQ ID NO: 7411 - RNA, 20 nt, synthetic construct
  source 1..20: mol_type = other RNA
ctgaacaactttatggtggc

SEQ ID NO: 7412 - RNA, 20 nt, synthetic construct
  source 1..20: mol_type = other RNA
tctgaacaactttatggtgg

SEQ ID NO: 7413 - RNA, 20 nt, synthetic construct
  source 1..20: mol_type = other RNA
tgaagggtggcgaggacctg

SEQ ID NO: 7414 - RNA, 20 nt, synthetic construct
  source 1..20: mol_type = other RNA
ggtgaagggtggcgaggacc

SEQ ID NO: 7415 - RNA, 20 nt, synthetic construct
  source 1..20: mol_type = other RNA
gtgaagggtggcgaggacct

SEQ ID NO: 7416 - RNA, 20 nt, synthetic construct
  source 1..20: mol_type = other RNA
tggtgaagggtggcgaggac

SEQ ID NO: 7417 - RNA, 20 nt, synthetic construct
  source 1..20: mol_type = other RNA
ctggtgaagggtggcgagga

SEQ ID NO: 7418 - RNA, 20 nt, synthetic construct
  source 1..20: mol_type = other RNA
cctggtgaagggtggcgagg

SEQ ID NO: 7419 - RNA, 20 nt, synthetic construct
  source 1..20: mol_type = other RNA
tacagggacctcaagccaga

SEQ ID NO: 7420 - RNA, 20 nt, synthetic construct
  source 1..20: mol_type = other RNA
acagggacctcaagccagaa

SEQ ID NO: 7421 - RNA, 20 nt, synthetic construct
  source 1..20: mol_type = other RNA
cagggacctcaagccagaaa

SEQ ID NO: 7422 - RNA, 20 nt, synthetic construct
  source 1..20: mol_type = other RNA
agggacctcaagccagaaaa

SEQ ID NO: 7423 - RNA, 20 nt, synthetic construct
  source 1..20: mol_type = other RNA
gggacctcaagccagaaaat

SEQ ID NO: 7424 - RNA, 20 nt, synthetic construct
  source 1..20: mol_type = other RNA
aaaatctcatcctagatcac

SEQ ID NO: 7425 - RNA, 20 nt, synthetic construct
  source 1..20: mol_type = other RNA
gccagaaaatctcatcctag

SEQ ID NO: 7426 - RNA, 20 nt, synthetic construct
  source 1..20: mol_type = other RNA
ccagaaaatctcatcctaga

SEQ ID NO: 7427 - RNA, 20 nt, synthetic construct
  source 1..20: mol_type = other RNA
cagaaaatctcatcctagat

SEQ ID NO: 7428 - RNA, 20 nt, synthetic construct
  source 1..20: mol_type = other RNA
agaaaatctcatcctagatc

SEQ ID NO: 7429 - RNA, 20 nt, synthetic construct
  source 1..20: mol_type = other RNA
gaaaatctcatcctagatca

SEQ ID NO: 7430 - RNA, 20 nt, synthetic construct
  source 1..20: mol_type = other RNA
caatgaagattctcaagaaa

SEQ ID NO: 7431 - RNA, 20 nt, synthetic construct
  source 1..20: mol_type = other RNA
tgcaatgaagattctcaaga

SEQ ID NO: 7432 - RNA, 20 nt, synthetic construct
  source 1..20: mol_type = other RNA
gcaatgaagattctcaagaa

SEQ ID NO: 7433 - RNA, 20 nt, synthetic construct
  source 1..20: mol_type = other RNA
aatgaagattctcaagaaac

SEQ ID NO: 7434 - RNA, 20 nt, synthetic construct
  source 1..20: mol_type = other RNA
atgaagattctcaagaaacg

SEQ ID NO: 7435 - RNA, 20 nt, synthetic construct
  source 1..20: mol_type = other RNA
tgaagattctcaagaaacgt

SEQ ID NO: 7436 - RNA, 20 nt, synthetic construct
  source 1..20: mol_type = other RNA
ggttgactttggatttgcga

SEQ ID NO: 7437 - RNA, 20 nt, synthetic construct
  source 1..20: mol_type = other RNA
ttgactttggatttgcgaag

SEQ ID NO: 7438 - RNA, 20 nt, synthetic construct
  source 1..20: mol_type = other RNA
gttgactttggatttgcgaa

SEQ ID NO: 7439 - RNA, 20 nt, synthetic construct
  source 1..20: mol_type = other RNA
aggttgactttggatttgcg

SEQ ID NO: 7440 - RNA, 20 nt, synthetic construct
  source 1..20: mol_type = other RNA
caggttgactttggatttgc

SEQ ID NO: 7441 - RNA, 20 nt, synthetic construct
  source 1..20: mol_type = other RNA
gagacttgaaaccagaaaac

SEQ ID NO: 7442 - RNA, 20 nt, synthetic construct
  source 1..20: mol_type = other RNA
cagagacttgaaaccagaaa

SEQ ID NO: 7443 - RNA, 20 nt, synthetic construct
  source 1..20: mol_type = other RNA
acagagacttgaaaccagaa

SEQ ID NO: 7444 - RNA, 20 nt, synthetic construct
  source 1..20: mol_type = other RNA
tacagagacttgaaaccaga

SEQ ID NO: 7445 - RNA, 20 nt, synthetic construct
  source 1..20: mol_type = other RNA
agagacttgaaaccagaaaa

SEQ ID NO: 7446 - RNA, 20 nt, synthetic construct
  source 1..20: mol_type = other RNA
gaaaacttaattctagatgc

SEQ ID NO: 7447 - RNA, 20 nt, synthetic construct
  source 1..20: mol_type = other RNA
ccagaaaacttaattctaga

SEQ ID NO: 7448 - RNA, 20 nt, synthetic construct
  source 1..20: mol_type = other RNA
aaaacttaattctagatgct

SEQ ID NO: 7449 - RNA, 20 nt, synthetic construct
  source 1..20: mol_type = other RNA
agaaaacttaattctagatg

SEQ ID NO: 7450 - RNA, 20 nt, synthetic construct
  source 1..20: mol_type = other RNA
cagaaaacttaattctagat

SEQ ID NO: 7451 - RNA, 20 nt, synthetic construct
  source 1..20: mol_type = other RNA
accagaaaacttaattctag

SEQ ID NO: 7452 - RNA, 20 nt, synthetic construct
  source 1..20: mol_type = other RNA
tatgaagtgtataaggaaga

SEQ ID NO: 7453 - RNA, 20 nt, synthetic construct
  source 1..20: mol_type = other RNA
tgctatgaagtgtataagga

SEQ ID NO: 7454 - RNA, 20 nt, synthetic construct
  source 1..20: mol_type = other RNA
tgaagtgtataaggaagaag

SEQ ID NO: 7455 - RNA, 20 nt, synthetic construct
  source 1..20: mol_type = other RNA
atgaagtgtataaggaagaa

SEQ ID NO: 7456 - RNA, 20 nt, synthetic construct
  source 1..20: mol_type = other RNA
ctatgaagtgtataaggaag

SEQ ID NO: 7457 - RNA, 20 nt, synthetic construct
  source 1..20: mol_type = other RNA
gctatgaagtgtataaggaa

SEQ ID NO: 7458 - RNA, 20 nt, synthetic construct
  source 1..20: mol_type = other RNA
cacggactttgggttcgcca

SEQ ID NO: 7459 - RNA, 20 nt, synthetic construct
  source 1..20: mol_type = other RNA
cggactttgggttcgccaag

SEQ ID NO: 7460 - RNA, 20 nt, synthetic construct
  source 1..20: mol_type = other RNA
acggactttgggttcgccaa

SEQ ID NO: 7461 - RNA, 20 nt, synthetic construct
  source 1..20: mol_type = other RNA
tcacggactttgggttcgcc

SEQ ID NO: 7462 - RNA, 20 nt, synthetic construct
  source 1..20: mol_type = other RNA
ctcacggactttgggttcgc

SEQ ID NO: 7463 - RNA, 20 nt, synthetic construct
  source 1..20: mol_type = other RNA
gggacttgaagccagagaac

SEQ ID NO: 7464 - RNA, 20 nt, synthetic construct
  source 1..20: mol_type = other RNA
agggacttgaagccagagaa

SEQ ID NO: 7465 - RNA, 20 nt, synthetic construct
  source 1..20: mol_type = other RNA
cagggacttgaagccagaga

SEQ ID NO: 7466 - RNA, 20 nt, synthetic construct
  source 1..20: mol_type = other RNA
acagggacttgaagccagag

SEQ ID NO: 7467 - RNA, 20 nt, synthetic construct
  source 1..20: mol_type = other RNA
tacagggacttgaagccaga

SEQ ID NO: 7468 - RNA, 20 nt, synthetic construct
  source 1..20: mol_type = other RNA
gagaacatcctgctggatag

SEQ ID NO: 7469 - RNA, 20 nt, synthetic construct
  source 1..20: mol_type = other RNA
agagaacatcctgctggata

SEQ ID NO: 7470 - RNA, 20 nt, synthetic construct
  source 1..20: mol_type = other RNA
cagagaacatcctgctggat

SEQ ID NO: 7471 - RNA, 20 nt, synthetic construct
  source 1..20: mol_type = other RNA
agaacatcctgctggatagg

SEQ ID NO: 7472 - RNA, 20 nt, synthetic construct
  source 1..20: mol_type = other RNA
ccagagaacatcctgctgga

SEQ ID NO: 7473 - RNA, 20 nt, synthetic construct
  source 1..20: mol_type = other RNA
gccagagaacatcctgctgg

SEQ ID NO: 7474 - RNA, 20 nt, synthetic construct
  source 1..20: mol_type = other RNA
ctcaaggtgatgagcattcc

SEQ ID NO: 7475 - RNA, 20 nt, synthetic construct
  source 1..20: mol_type = other RNA
tcaaggtgatgagcattccc

SEQ ID NO: 7476 - RNA, 20 nt, synthetic construct
  source 1..20: mol_type = other RNA
cctcaaggtgatgagcattc

SEQ ID NO: 7477 - RNA, 20 nt, synthetic construct
  source 1..20: mol_type = other RNA
ccctcaaggtgatgagcatt

SEQ ID NO: 7478 - RNA, 20 nt, synthetic construct
  source 1..20: mol_type = other RNA
gccctcaaggtgatgagcat

SEQ ID NO: 7479 - RNA, 20 nt, synthetic construct
  source 1..20: mol_type = other RNA
cgccctcaaggtgatgagca

SEQ ID NO: 7480 - RNA, 20 nt, synthetic construct
  source 1..20: mol_type = other RNA
catgcagatatcaagccaga

SEQ ID NO: 7481 - RNA, 20 nt, synthetic construct
  source 1..20: mol_type = other RNA
atgcagatatcaagccagac

SEQ ID NO: 7482 - RNA, 20 nt, synthetic construct
  source 1..20: mol_type = other RNA
tgcagatatcaagccagaca

SEQ ID NO: 7483 - RNA, 20 nt, synthetic construct
  source 1..20: mol_type = other RNA
gcagatatcaagccagacaa

SEQ ID NO: 7484 - RNA, 20 nt, synthetic construct
  source 1..20: mol_type = other RNA
cagatatcaagccagacaat

SEQ ID NO: 7485 - RNA, 20 nt, synthetic construct
  source 1..20: mol_type = other RNA
gccagacaatatcctggtaa

SEQ ID NO: 7486 - RNA, 20 nt, synthetic construct
  source 1..20: mol_type = other RNA
ccagacaatatcctggtaag

SEQ ID NO: 7487 - RNA, 20 nt, synthetic construct
  source 1..20: mol_type = other RNA
cagacaatatcctggtaagt

SEQ ID NO: 7488 - RNA, 20 nt, synthetic construct
  source 1..20: mol_type = other RNA
agacaatatcctggtaagtc

SEQ ID NO: 7489 - RNA, 20 nt, synthetic construct
  source 1..20: mol_type = other RNA
gacaatatcctggtaagtca

SEQ ID NO: 7490 - RNA, 20 nt, synthetic construct
  source 1..20: mol_type = other RNA
acaatatcctggtaagtcaa

SEQ ID NO: 7491 - RNA, 20 nt, synthetic construct
  source 1..20: mol_type = other RNA
gtaaagatcatcagaaacaa

SEQ ID NO: 7492 - RNA, 20 nt, synthetic construct
  source 1..20: mol_type = other RNA
ggctgtaaagatcatcagaa

SEQ ID NO: 7493 - RNA, 20 nt, synthetic construct
  source 1..20: mol_type = other RNA
gctgtaaagatcatcagaaa

SEQ ID NO: 7494 - RNA, 20 nt, synthetic construct
  source 1..20: mol_type = other RNA
ctgtaaagatcatcagaaac

SEQ ID NO: 7495 - RNA, 20 nt, synthetic construct
  source 1..20: mol_type = other RNA
tgtaaagatcatcagaaaca

SEQ ID NO: 7496 - RNA, 20 nt, synthetic construct
  source 1..20: mol_type = other RNA
taaagatcatcagaaacaat

SEQ ID NO: 7497 - RNA, 20 nt, synthetic construct
  source 1..20: mol_type = other RNA
tcaccgacttcggcctggcc

SEQ ID NO: 7498 - RNA, 20 nt, synthetic construct
  source 1..20: mol_type = other RNA
accgacttcggcctggccag

SEQ ID NO: 7499 - RNA, 20 nt, synthetic construct
  source 1..20: mol_type = other RNA
atcaccgacttcggcctggc

SEQ ID NO: 7500 - RNA, 20 nt, synthetic construct
  source 1..20: mol_type = other RNA
caccgacttcggcctggcca

SEQ ID NO: 7501 - RNA, 20 nt, synthetic construct
  source 1..20: mol_type = other RNA
ccgacttcggcctggccagt

SEQ ID NO: 7502 - RNA, 20 nt, synthetic construct
  source 1..20: mol_type = other RNA
caccgagacctcaaacctga

SEQ ID NO: 7503 - RNA, 20 nt, synthetic construct
  source 1..20: mol_type = other RNA
accgagacctcaaacctgag

SEQ ID NO: 7504 - RNA, 20 nt, synthetic construct
  source 1..20: mol_type = other RNA
ccgagacctcaaacctgaga

SEQ ID NO: 7505 - RNA, 20 nt, synthetic construct
  source 1..20: mol_type = other RNA
cgagacctcaaacctgagaa

SEQ ID NO: 7506 - RNA, 20 nt, synthetic construct
  source 1..20: mol_type = other RNA
gagacctcaaacctgagaat

SEQ ID NO: 7507 - RNA, 20 nt, synthetic construct
  source 1..20: mol_type = other RNA
acctgagaatctgctctact

SEQ ID NO: 7508 - RNA, 20 nt, synthetic construct
  source 1..20: mol_type = other RNA
cctgagaatctgctctacta

SEQ ID NO: 7509 - RNA, 20 nt, synthetic construct
  source 1..20: mol_type = other RNA
ctgagaatctgctctactac

SEQ ID NO: 7510 - RNA, 20 nt, synthetic construct
  source 1..20: mol_type = other RNA
tgagaatctgctctactacc

SEQ ID NO: 7511 - RNA, 20 nt, synthetic construct
  source 1..20: mol_type = other RNA
gagaatctgctctactacca

SEQ ID NO: 7512 - RNA, 20 nt, synthetic construct
  source 1..20: mol_type = other RNA
agaatctgctctactaccat

SEQ ID NO: 7513 - RNA, 20 nt, synthetic construct
  source 1..20: mol_type = other RNA
catcaagatgattgagacca

SEQ ID NO: 7514 - RNA, 20 nt, synthetic construct
  source 1..20: mol_type = other RNA
tgccatcaagatgattgaga

SEQ ID NO: 7515 - RNA, 20 nt, synthetic construct
  source 1..20: mol_type = other RNA
gccatcaagatgattgagac

SEQ ID NO: 7516 - RNA, 20 nt, synthetic construct
  source 1..20: mol_type = other RNA
ccatcaagatgattgagacc

SEQ ID NO: 7517 - RNA, 20 nt, synthetic construct
  source 1..20: mol_type = other RNA
atcaagatgattgagaccaa

SEQ ID NO: 7518 - RNA, 20 nt, synthetic construct
  source 1..20: mol_type = other RNA
tcaagatgattgagaccaag

SEQ ID NO: 7519 - RNA, 20 nt, synthetic construct
  source 1..20: mol_type = other RNA
aaaacctcttatactatcat

SEQ ID NO: 7520 - RNA, 20 nt, synthetic construct
  source 1..20: mol_type = other RNA
gaaaacctcttatactatca

SEQ ID NO: 7521 - RNA, 20 nt, synthetic construct
  source 1..20: mol_type = other RNA
tgaaaacctcttatactatc

SEQ ID NO: 7522 - RNA, 20 nt, synthetic construct
  source 1..20: mol_type = other RNA
ctgaaaacctcttatactat

SEQ ID NO: 7523 - RNA, 20 nt, synthetic construct
  source 1..20: mol_type = other RNA
cctgaaaacctcttatacta

SEQ ID NO: 7524 - RNA, 20 nt, synthetic construct
  source 1..20: mol_type = other RNA
gcctgaaaacctcttatact

SEQ ID NO: 7525 - RNA, 20 nt, synthetic construct
  source 1..20: mol_type = other RNA
aaaagtgatggaaaccagag

SEQ ID NO: 7526 - RNA, 20 nt, synthetic construct
  source 1..20: mol_type = other RNA
ataaaagtgatggaaaccag

SEQ ID NO: 7527 - RNA, 20 nt, synthetic construct
  source 1..20: mol_type = other RNA
caataaaagtgatggaaacc

SEQ ID NO: 7528 - RNA, 20 nt, synthetic construct
  source 1..20: mol_type = other RNA
taaaagtgatggaaaccaga

SEQ ID NO: 7529 - RNA, 20 nt, synthetic construct
  source 1..20: mol_type = other RNA
aataaaagtgatggaaacca

SEQ ID NO: 7530 - RNA, 20 nt, synthetic construct
  source 1..20: mol_type = other RNA
gcaataaaagtgatggaaac

SEQ ID NO: 7531 - RNA, 20 nt, synthetic construct
  source 1..20: mol_type = other RNA
tgcaataaaagtgatggaaa

SEQ ID NO: 7532 - RNA, 20 nt, synthetic construct
  source 1..20: mol_type = other RNA
taggagactttggattatcc

SEQ ID NO: 7533 - RNA, 20 nt, synthetic construct
  source 1..20: mol_type = other RNA
gagactttggattatcccga

SEQ ID NO: 7534 - RNA, 20 nt, synthetic construct
  source 1..20: mol_type = other RNA
ggagactttggattatcccg

SEQ ID NO: 7535 - RNA, 20 nt, synthetic construct
  source 1..20: mol_type = other RNA
aggagactttggattatccc

SEQ ID NO: 7536 - RNA, 20 nt, synthetic construct
  source 1..20: mol_type = other RNA
ttaggagactttggattatc

SEQ ID NO: 7537 - RNA, 20 nt, synthetic construct
  source 1..20: mol_type = other RNA
agggacattgctgctcggaa

SEQ ID NO: 7538 - RNA, 20 nt, synthetic construct
  source 1..20: mol_type = other RNA
gggacattgctgctcggaat

SEQ ID NO: 7539 - RNA, 20 nt, synthetic construct
  source 1..20: mol_type = other RNA
cagggacattgctgctcgga

SEQ ID NO: 7540 - RNA, 20 nt, synthetic construct
  source 1..20: mol_type = other RNA
tcagggacattgctgctcgg

SEQ ID NO: 7541 - RNA, 20 nt, synthetic construct
  source 1..20: mol_type = other RNA
atcagggacattgctgctcg

SEQ ID NO: 7542 - RNA, 20 nt, synthetic construct
  source 1..20: mol_type = other RNA
ggaatgttctggtgtcctca

SEQ ID NO: 7543 - RNA, 20 nt, synthetic construct
  source 1..20: mol_type = other RNA
cggaatgttctggtgtcctc

SEQ ID NO: 7544 - RNA, 20 nt, synthetic construct
  source 1..20: mol_type = other RNA
tcggaatgttctggtgtcct

SEQ ID NO: 7545 - RNA, 20 nt, synthetic construct
  source 1..20: mol_type = other RNA
ctcggaatgttctggtgtcc

SEQ ID NO: 7546 - RNA, 20 nt, synthetic construct
  source 1..20: mol_type = other RNA
gctcggaatgttctggtgtc

SEQ ID NO: 7547 - RNA, 20 nt, synthetic construct
  source 1..20: mol_type = other RNA
tgctcggaatgttctggtgt

SEQ ID NO: 7548 - RNA, 20 nt, synthetic construct
  source 1..20: mol_type = other RNA
tgcaattaaaacatgtaaaa

SEQ ID NO: 7549 - RNA, 20 nt, synthetic construct
  source 1..20: mol_type = other RNA
ggggactttggtctttcccg

SEQ ID NO: 7550 - RNA, 20 nt, synthetic construct
  source 1..20: mol_type = other RNA
gggactttggtctttcccgg

SEQ ID NO: 7551 - RNA, 20 nt, synthetic construct
  source 1..20: mol_type = other RNA
tccagggacattgctgtccg

SEQ ID NO: 7552 - RNA, 20 nt, synthetic construct
  source 1..20: mol_type = other RNA
ccagggacattgctgtccgg

SEQ ID NO: 7553 - RNA, 20 nt, synthetic construct
  source 1..20: mol_type = other RNA
cagggacattgctgtccgga

SEQ ID NO: 7554 - RNA, 20 nt, synthetic construct
  source 1..20: mol_type = other RNA
agggacattgctgtccggaa

SEQ ID NO: 7555 - RNA, 20 nt, synthetic construct
  source 1..20: mol_type = other RNA
gggacattgctgtccggaac

SEQ ID NO: 7556 - RNA, 20 nt, synthetic construct
  source 1..20: mol_type = other RNA
tgtccggaacatcctggtgg

SEQ ID NO: 7557 - RNA, 20 nt, synthetic construct
  source 1..20: mol_type = other RNA
gtccggaacatcctggtggc

SEQ ID NO: 7558 - RNA, 20 nt, synthetic construct
  source 1..20: mol_type = other RNA
tccggaacatcctggtggcc

SEQ ID NO: 7559 - RNA, 20 nt, synthetic construct
  source 1..20: mol_type = other RNA
ccggaacatcctggtggcct

SEQ ID NO: 7560 - RNA, 20 nt, synthetic construct
  source 1..20: mol_type = other RNA
cggaacatcctggtggcctc

SEQ ID NO: 7561 - RNA, 20 nt, synthetic construct
  source 1..20: mol_type = other RNA
ggaacatcctggtggcctcc

SEQ ID NO: 7562 - RNA, 20 nt, synthetic construct
  source 1..20: mol_type = other RNA
gctgtcaagacctgcaagaa

SEQ ID NO: 7563 - RNA, 20 nt, synthetic construct
  source 1..20: mol_type = other RNA
tcaagacctgcaagaaagac

SEQ ID NO: 7564 - RNA, 20 nt, synthetic construct
  source 1..20: mol_type = other RNA
agctgtcaagacctgcaaga

SEQ ID NO: 7565 - RNA, 20 nt, synthetic construct
  source 1..20: mol_type = other RNA
ctgtcaagacctgcaagaaa

SEQ ID NO: 7566 - RNA, 20 nt, synthetic construct
  source 1..20: mol_type = other RNA
tgtcaagacctgcaagaaag

SEQ ID NO: 7567 - RNA, 20 nt, synthetic construct
  source 1..20: mol_type = other RNA
gtcaagacctgcaagaaaga

SEQ ID NO: 7568 - RNA, 20 nt, synthetic construct
  source 1..20: mol_type = other RNA
tggggacttcgggttagcca

SEQ ID NO: 7569 - RNA, 20 nt, synthetic construct
  source 1..20: mol_type = other RNA
ttggggacttcgggttagcc

SEQ ID NO: 7570 - RNA, 20 nt, synthetic construct
  source 1..20: mol_type = other RNA
gggacttcgggttagccagg

SEQ ID NO: 7571 - RNA, 20 nt, synthetic construct
  source 1..20: mol_type = other RNA
ggggacttcgggttagccag

SEQ ID NO: 7572 - RNA, 20 nt, synthetic construct
  source 1..20: mol_type = other RNA
gttggggacttcgggttagc

SEQ ID NO: 7573 - RNA, 20 nt, synthetic construct
  source 1..20: mol_type = other RNA
gggacctggccgccaggaac

SEQ ID NO: 7574 - RNA, 20 nt, synthetic construct
  source 1..20: mol_type = other RNA
cgggacctggccgccaggaa

SEQ ID NO: 7575 - RNA, 20 nt, synthetic construct
  source 1..20: mol_type = other RNA
ccgggacctggccgccagga

SEQ ID NO: 7576 - RNA, 20 nt, synthetic construct
  source 1..20: mol_type = other RNA
accgggacctggccgccagg

SEQ ID NO: 7577 - RNA, 20 nt, synthetic construct
  source 1..20: mol_type = other RNA
caccgggacctggccgccag

SEQ ID NO: 7578 - RNA, 20 nt, synthetic construct
  source 1..20: mol_type = other RNA
gccaggaacatcctcgtcgg

SEQ ID NO: 7579 - RNA, 20 nt, synthetic construct
  source 1..20: mol_type = other RNA
cgccaggaacatcctcgtcg

SEQ ID NO: 7580 - RNA, 20 nt, synthetic construct
  source 1..20: mol_type = other RNA
ggaacatcctcgtcggggaa

SEQ ID NO: 7581 - RNA, 20 nt, synthetic construct
  source 1..20: mol_type = other RNA
aggaacatcctcgtcgggga

SEQ ID NO: 7582 - RNA, 20 nt, synthetic construct
  source 1..20: mol_type = other RNA
caggaacatcctcgtcgggg

SEQ ID NO: 7583 - RNA, 20 nt, synthetic construct
  source 1..20: mol_type = other RNA
ccaggaacatcctcgtcggg

SEQ ID NO: 7584 - RNA, 20 nt, synthetic construct
  source 1..20: mol_type = other RNA
attaaggtgatttctcgagg

SEQ ID NO: 7585 - RNA, 20 nt, synthetic construct
  source 1..20: mol_type = other RNA
ccattaaggtgatttctcga

SEQ ID NO: 7586 - RNA, 20 nt, synthetic construct
  source 1..20: mol_type = other RNA
gccattaaggtgatttctcg

SEQ ID NO: 7587 - RNA, 20 nt, synthetic construct
  source 1..20: mol_type = other RNA
ttaaggtgatttctcgaggt

SEQ ID NO: 7588 - RNA, 20 nt, synthetic construct
  source 1..20: mol_type = other RNA
cattaaggtgatttctcgag

SEQ ID NO: 7589 - RNA, 20 nt, synthetic construct
  source 1..20: mol_type = other RNA
ggccattaaggtgatttctc

SEQ ID NO: 7590 - RNA, 20 nt, synthetic construct
  source 1..20: mol_type = other RNA
aggacttggctgcgcgtaac

SEQ ID NO: 7591 - RNA, 20 nt, synthetic construct
  source 1..20: mol_type = other RNA
cataaggacttggctgcgcg

SEQ ID NO: 7592 - RNA, 20 nt, synthetic construct
  source 1..20: mol_type = other RNA
ataaggacttggctgcgcgt

SEQ ID NO: 7593 - RNA, 20 nt, synthetic construct
  source 1..20: mol_type = other RNA
taaggacttggctgcgcgta

SEQ ID NO: 7594 - RNA, 20 nt, synthetic construct
  source 1..20: mol_type = other RNA
aaggacttggctgcgcgtaa

SEQ ID NO: 7595 - RNA, 20 nt, synthetic construct
  source 1..20: mol_type = other RNA
gcgcgtaactgcctggtcag

SEQ ID NO: 7596 - RNA, 20 nt, synthetic construct
  source 1..20: mol_type = other RNA
tgcgcgtaactgcctggtca

SEQ ID NO: 7597 - RNA, 20 nt, synthetic construct
  source 1..20: mol_type = other RNA
cgcgtaactgcctggtcagt

SEQ ID NO: 7598 - RNA, 20 nt, synthetic construct
  source 1..20: mol_type = other RNA
gcgtaactgcctggtcagtg

SEQ ID NO: 7599 - RNA, 20 nt, synthetic construct
  source 1..20: mol_type = other RNA
cgtaactgcctggtcagtgc

SEQ ID NO: 7600 - RNA, 20 nt, synthetic construct
  source 1..20: mol_type = other RNA
gtaactgcctggtcagtgcc

SEQ ID NO: 7601 - RNA, 20 nt, synthetic construct
  source 1..20: mol_type = other RNA
tgtgaagagcctgcagagca

SEQ ID NO: 7602 - RNA, 20 nt, synthetic construct
  source 1..20: mol_type = other RNA
gtgaagagcctgcagagcaa

SEQ ID NO: 7603 - RNA, 20 nt, synthetic construct
  source 1..20: mol_type = other RNA
acttgtgaagagcctgcaga

SEQ ID NO: 7604 - RNA, 20 nt, synthetic construct
  source 1..20: mol_type = other RNA
cttgtgaagagcctgcagag

SEQ ID NO: 7605 - RNA, 20 nt, synthetic construct
  source 1..20: mol_type = other RNA
ttgtgaagagcctgcagagc

SEQ ID NO: 7606 - RNA, 20 nt, synthetic construct
  source 1..20: mol_type = other RNA
tgaagagcctgcagagcaag

SEQ ID NO: 7607 - RNA, 20 nt, synthetic construct
  source 1..20: mol_type = other RNA
ctgctggaccttgagaattc

SEQ ID NO: 7608 - RNA, 20 nt, synthetic construct
  source 1..20: mol_type = other RNA
tgctggaccttgagaattcc

SEQ ID NO: 7609 - RNA, 20 nt, synthetic construct
  source 1..20: mol_type = other RNA
gctggaccttgagaattcct

SEQ ID NO: 7610 - RNA, 20 nt, synthetic construct
  source 1..20: mol_type = other RNA
ctggaccttgagaattcctt

SEQ ID NO: 7611 - RNA, 20 nt, synthetic construct
  source 1..20: mol_type = other RNA
tggaccttgagaattcctta

SEQ ID NO: 7612 - RNA, 20 nt, synthetic construct
  source 1..20: mol_type = other RNA
gcctccaatgtgatgctcga

SEQ ID NO: 7613 - RNA, 20 nt, synthetic construct
  source 1..20: mol_type = other RNA
cctccaatgtgatgctcgat

SEQ ID NO: 7614 - RNA, 20 nt, synthetic construct
  source 1..20: mol_type = other RNA
ctccaatgtgatgctcgatg

SEQ ID NO: 7615 - RNA, 20 nt, synthetic construct
  source 1..20: mol_type = other RNA
tccaatgtgatgctcgatgg

SEQ ID NO: 7616 - RNA, 20 nt, synthetic construct
  source 1..20: mol_type = other RNA
cgcctccaatgtgatgctcg

SEQ ID NO: 7617 - RNA, 20 nt, synthetic construct
  source 1..20: mol_type = other RNA
ccaatgtgatgctcgatggg

SEQ ID NO: 7618 - RNA, 20 nt, synthetic construct
  source 1..20: mol_type = other RNA
atagagacatgaaatccaac

SEQ ID NO: 7619 - RNA, 20 nt, synthetic construct
  source 1..20: mol_type = other RNA
gagacatgaaatccaacagt

SEQ ID NO: 7620 - RNA, 20 nt, synthetic construct
  source 1..20: mol_type = other RNA
agagacatgaaatccaacag

SEQ ID NO: 7621 - RNA, 20 nt, synthetic construct
  source 1..20: mol_type = other RNA
tagagacatgaaatccaaca

SEQ ID NO: 7622 - RNA, 20 nt, synthetic construct
  source 1..20: mol_type = other RNA
catagagacatgaaatccaa

SEQ ID NO: 7623 - RNA, 20 nt, synthetic construct
  source 1..20: mol_type = other RNA
gagatatatttctccatgaa

SEQ ID NO: 7624 - RNA, 20 nt, synthetic construct
  source 1..20: mol_type = other RNA
tgagatatatttctccatga

SEQ ID NO: 7625 - RNA, 20 nt, synthetic construct
  source 1..20: mol_type = other RNA
cattgagatatatttctcca

SEQ ID NO: 7626 - RNA, 20 nt, synthetic construct
  source 1..20: mol_type = other RNA
ttgagatatatttctccatg

SEQ ID NO: 7627 - RNA, 20 nt, synthetic construct
  source 1..20: mol_type = other RNA
attgagatatatttctccat

SEQ ID NO: 7628 - RNA, 20 nt, synthetic construct
  source 1..20: mol_type = other RNA
caacagtatcctttggttgt

SEQ ID NO: 7629 - RNA, 20 nt, synthetic construct
  source 1..20: mol_type = other RNA
atccaacagtatcctttggt

SEQ ID NO: 7630 - RNA, 20 nt, synthetic construct
  source 1..20: mol_type = other RNA
aacagtatcctttggttgtt

SEQ ID NO: 7631 - RNA, 20 nt, synthetic construct
  source 1..20: mol_type = other RNA
ccaacagtatcctttggttg

SEQ ID NO: 7632 - RNA, 20 nt, synthetic construct
  source 1..20: mol_type = other RNA
tccaacagtatcctttggtt

SEQ ID NO: 7633 - RNA, 20 nt, synthetic construct
  source 1..20: mol_type = other RNA
gtaaagatcctaaaggttgt

SEQ ID NO: 7634 - RNA, 20 nt, synthetic construct
  source 1..20: mol_type = other RNA
gcagtaaagatcctaaaggt

SEQ ID NO: 7635 - RNA, 20 nt, synthetic construct
  source 1..20: mol_type = other RNA
taaagatcctaaaggttgtc

SEQ ID NO: 7636 - RNA, 20 nt, synthetic construct
  source 1..20: mol_type = other RNA
agtaaagatcctaaaggttg

SEQ ID NO: 7637 - RNA, 20 nt, synthetic construct
  source 1..20: mol_type = other RNA
cagtaaagatcctaaaggtt

SEQ ID NO: 7638 - RNA, 20 nt, synthetic construct
  source 1..20: mol_type = other RNA
tgcagtaaagatcctaaagg

SEQ ID NO: 7639 - RNA, 20 nt, synthetic construct
  source 1..20: mol_type = other RNA
tttcggatttcggcttgtcc

SEQ ID NO: 7640 - RNA, 20 nt, synthetic construct
  source 1..20: mol_type = other RNA
tcggatttcggcttgtcccg

SEQ ID NO: 7641 - RNA, 20 nt, synthetic construct
  source 1..20: mol_type = other RNA
atttcggatttcggcttgtc

SEQ ID NO: 7642 - RNA, 20 nt, synthetic construct
  source 1..20: mol_type = other RNA
ttcggatttcggcttgtccc

SEQ ID NO: 7643 - RNA, 20 nt, synthetic construct
  source 1..20: mol_type = other RNA
cggatttcggcttgtcccga

SEQ ID NO: 7644 - RNA, 20 nt, synthetic construct
  source 1..20: mol_type = other RNA
catcgggacttggcagccag

SEQ ID NO: 7645 - RNA, 20 nt, synthetic construct
  source 1..20: mol_type = other RNA
atcgggacttggcagccaga

SEQ ID NO: 7646 - RNA, 20 nt, synthetic construct
  source 1..20: mol_type = other RNA
tcgggacttggcagccagaa

SEQ ID NO: 7647 - RNA, 20 nt, synthetic construct
  source 1..20: mol_type = other RNA
cgggacttggcagccagaaa

SEQ ID NO: 7648 - RNA, 20 nt, synthetic construct
  source 1..20: mol_type = other RNA
gggacttggcagccagaaac

SEQ ID NO: 7649 - RNA, 20 nt, synthetic construct
  source 1..20: mol_type = other RNA
gccagaaacatcctggtagc

SEQ ID NO: 7650 - RNA, 20 nt, synthetic construct
  source 1..20: mol_type = other RNA
cagaaacatcctggtagctg

SEQ ID NO: 7651 - RNA, 20 nt, synthetic construct
  source 1..20: mol_type = other RNA
agaaacatcctggtagctga

SEQ ID NO: 7652 - RNA, 20 nt, synthetic construct
  source 1..20: mol_type = other RNA
gaaacatcctggtagctgag

SEQ ID NO: 7653 - RNA, 20 nt, synthetic construct
  source 1..20: mol_type = other RNA
agccagaaacatcctggtag

SEQ ID NO: 7654 - RNA, 20 nt, synthetic construct
  source 1..20: mol_type = other RNA
ccagaaacatcctggtagct

SEQ ID NO: 7655 - RNA, 20 nt, synthetic construct
  source 1..20: mol_type = other RNA
tgaagatgctgaaaggtacc

SEQ ID NO: 7656 - RNA, 20 nt, synthetic construct
  source 1..20: mol_type = other RNA
ggccgtgaagatgctgaaag

SEQ ID NO: 7657 - RNA, 20 nt, synthetic construct
  source 1..20: mol_type = other RNA
cgtgaagatgctgaaaggta

SEQ ID NO: 7658 - RNA, 20 nt, synthetic construct
  source 1..20: mol_type = other RNA
gtgaagatgctgaaaggtac

SEQ ID NO: 7659 - RNA, 20 nt, synthetic construct
  source 1..20: mol_type = other RNA
atcattgacgtgtctcagtc

SEQ ID NO: 7660 - RNA, 20 nt, synthetic construct
  source 1..20: mol_type = other RNA
cattgacgtgtctcagtccg

SEQ ID NO: 7661 - RNA, 20 nt, synthetic construct
  source 1..20: mol_type = other RNA
attgacgtgtctcagtccgt

SEQ ID NO: 7662 - RNA, 20 nt, synthetic construct
  source 1..20: mol_type = other RNA
tcattgacgtgtctcagtcc

SEQ ID NO: 7663 - RNA, 20 nt, synthetic construct
  source 1..20: mol_type = other RNA
ttgacgtgtctcagtccgtg

SEQ ID NO: 7664 - RNA, 20 nt, synthetic construct
  source 1..20: mol_type = other RNA
catgcagatctcagtgaatt

SEQ ID NO: 7665 - RNA, 20 nt, synthetic construct
  source 1..20: mol_type = other RNA
atgcagatctcagtgaattt

SEQ ID NO: 7666 - RNA, 20 nt, synthetic construct
  source 1..20: mol_type = other RNA
tgcagatctcagtgaattta

SEQ ID NO: 7667 - RNA, 20 nt, synthetic construct
  source 1..20: mol_type = other RNA
gcagatctcagtgaatttaa

SEQ ID NO: 7668 - RNA, 20 nt, synthetic construct
  source 1..20: mol_type = other RNA
cagatctcagtgaatttaac

SEQ ID NO: 7669 - RNA, 20 nt, synthetic construct
  source 1..20: mol_type = other RNA
tgaatttaacatgctgtgag

SEQ ID NO: 7670 - RNA, 20 nt, synthetic construct
  source 1..20: mol_type = other RNA
gaatttaacatgctgtgagt

SEQ ID NO: 7671 - RNA, 20 nt, synthetic construct
  source 1..20: mol_type = other RNA
aatttaacatgctgtgagtg

SEQ ID NO: 7672 - RNA, 20 nt, synthetic construct
  source 1..20: mol_type = other RNA
atttaacatgctgtgagtgt

SEQ ID NO: 7673 - RNA, 20 nt, synthetic construct
  source 1..20: mol_type = other RNA
tttaacatgctgtgagtgta

SEQ ID NO: 7674 - RNA, 20 nt, synthetic construct
  source 1..20: mol_type = other RNA
ttaacatgctgtgagtgtat

SEQ ID NO: 7675 - RNA, 20 nt, synthetic construct
  source 1..20: mol_type = other RNA
agcaatcaaaatttataaaa

SEQ ID NO: 7676 - RNA, 20 nt, synthetic construct
  source 1..20: mol_type = other RNA
gcaatcaaaatttataaaac

SEQ ID NO: 7677 - RNA, 20 nt, synthetic construct
  source 1..20: mol_type = other RNA
caatcaaaatttataaaact

SEQ ID NO: 7678 - RNA, 20 nt, synthetic construct
  source 1..20: mol_type = other RNA
aatcaaaatttataaaactt

SEQ ID NO: 7679 - RNA, 20 nt, synthetic construct
  source 1..20: mol_type = other RNA
atcaaaatttataaaacttc

SEQ ID NO: 7680 - RNA, 20 nt, synthetic construct
  source 1..20: mol_type = other RNA
tcaaaatttataaaacttct

SEQ ID NO: 7681 - RNA, 20 nt, synthetic construct
  source 1..20: mol_type = other RNA
caaaatttataaaacttcta

SEQ ID NO: 7682 - RNA, 20 nt, synthetic construct
  source 1..20: mol_type = other RNA
taaagcttcacagactagga

SEQ ID NO: 7683 - RNA, 20 nt, synthetic construct
  source 1..20: mol_type = other RNA
cattaaagcttcacagacta

SEQ ID NO: 7684 - RNA, 20 nt, synthetic construct
  source 1..20: mol_type = other RNA
gcattaaagcttcacagact

SEQ ID NO: 7685 - RNA, 20 nt, synthetic construct
  source 1..20: mol_type = other RNA
ttaaagcttcacagactagg

SEQ ID NO: 7686 - RNA, 20 nt, synthetic construct
  source 1..20: mol_type = other RNA
attaaagcttcacagactag

SEQ ID NO: 7687 - RNA, 20 nt, synthetic construct
  source 1..20: mol_type = other RNA
tgcattaaagcttcacagac

SEQ ID NO: 7688 - RNA, 20 nt, synthetic construct
  source 1..20: mol_type = other RNA
ttgatcgatgtcagtcagtc

SEQ ID NO: 7689 - RNA, 20 nt, synthetic construct
  source 1..20: mol_type = other RNA
atcgatgtcagtcagtcagt

SEQ ID NO: 7690 - RNA, 20 nt, synthetic construct
  source 1..20: mol_type = other RNA
tgatcgatgtcagtcagtca

SEQ ID NO: 7691 - RNA, 20 nt, synthetic construct
  source 1..20: mol_type = other RNA
gatcgatgtcagtcagtcag

SEQ ID NO: 7692 - RNA, 20 nt, synthetic construct
  source 1..20: mol_type = other RNA
tcgatgtcagtcagtcagta

SEQ ID NO: 7693 - RNA, 20 nt, synthetic construct
  source 1..20: mol_type = other RNA
catgctgacctcagtgagta

SEQ ID NO: 7694 - RNA, 20 nt, synthetic construct
  source 1..20: mol_type = other RNA
atgctgacctcagtgagtat

SEQ ID NO: 7695 - RNA, 20 nt, synthetic construct
  source 1..20: mol_type = other RNA
tgctgacctcagtgagtata

SEQ ID NO: 7696 - RNA, 20 nt, synthetic construct
  source 1..20: mol_type = other RNA
gctgacctcagtgagtataa

SEQ ID NO: 7697 - RNA, 20 nt, synthetic construct
  source 1..20: mol_type = other RNA
ctgacctcagtgagtataac

SEQ ID NO: 7698 - RNA, 20 nt, synthetic construct
  source 1..20: mol_type = other RNA
gagtataacatgctgtggca

SEQ ID NO: 7699 - RNA, 20 nt, synthetic construct
  source 1..20: mol_type = other RNA
tataacatgctgtggcatgc

SEQ ID NO: 7700 - RNA, 20 nt, synthetic construct
  source 1..20: mol_type = other RNA
ataacatgctgtggcatgct

SEQ ID NO: 7701 - RNA, 20 nt, synthetic construct
  source 1..20: mol_type = other RNA
tgagtataacatgctgtggc

SEQ ID NO: 7702 - RNA, 20 nt, synthetic construct
  source 1..20: mol_type = other RNA
agtataacatgctgtggcat

SEQ ID NO: 7703 - RNA, 20 nt, synthetic construct
  source 1..20: mol_type = other RNA
gtataacatgctgtggcatg

SEQ ID NO: 7704 - RNA, 20 nt, synthetic construct
  source 1..20: mol_type = other RNA
tgccatcaaggtatttaaaa

SEQ ID NO: 7705 - RNA, 20 nt, synthetic construct
  source 1..20: mol_type = other RNA
gccatcaaggtatttaaaac

SEQ ID NO: 7706 - RNA, 20 nt, synthetic construct
  source 1..20: mol_type = other RNA
ccatcaaggtatttaaaaca

SEQ ID NO: 7707 - RNA, 20 nt, synthetic construct
  source 1..20: mol_type = other RNA
catcaaggtatttaaaacaa

SEQ ID NO: 7708 - RNA, 20 nt, synthetic construct
  source 1..20: mol_type = other RNA
atcaaggtatttaaaacaac

SEQ ID NO: 7709 - RNA, 20 nt, synthetic construct
  source 1..20: mol_type = other RNA
tcaaggtatttaaaacaacc

SEQ ID NO: 7710 - RNA, 20 nt, synthetic construct
  source 1..20: mol_type = other RNA
atcgcagacctcggccttgc

SEQ ID NO: 7711 - RNA, 20 nt, synthetic construct
  source 1..20: mol_type = other RNA
tcgcagacctcggccttgcc

SEQ ID NO: 7712 - RNA, 20 nt, synthetic construct
  source 1..20: mol_type = other RNA
cgcagacctcggccttgcct

SEQ ID NO: 7713 - RNA, 20 nt, synthetic construct
  source 1..20: mol_type = other RNA
gcagacctcggccttgcctc

SEQ ID NO: 7714 - RNA, 20 nt, synthetic construct
  source 1..20: mol_type = other RNA
cagacctcggccttgcctcc

SEQ ID NO: 7715 - RNA, 20 nt, synthetic construct
  source 1..20: mol_type = other RNA
cacaaggacctgaagcctga

SEQ ID NO: 7716 - RNA, 20 nt, synthetic construct
  source 1..20: mol_type = other RNA
acaaggacctgaagcctgaa

SEQ ID NO: 7717 - RNA, 20 nt, synthetic construct
  source 1..20: mol_type = other RNA
caaggacctgaagcctgaaa

SEQ ID NO: 7718 - RNA, 20 nt, synthetic construct
  source 1..20: mol_type = other RNA
aaggacctgaagcctgaaaa

SEQ ID NO: 7719 - RNA, 20 nt, synthetic construct
  source 1..20: mol_type = other RNA
aggacctgaagcctgaaaat

SEQ ID NO: 7720 - RNA, 20 nt, synthetic construct
  source 1..20: mol_type = other RNA
gaaaatatccttgttgataa

SEQ ID NO: 7721 - RNA, 20 nt, synthetic construct
  source 1..20: mol_type = other RNA
gcctgaaaatatccttgttg

SEQ ID NO: 7722 - RNA, 20 nt, synthetic construct
  source 1..20: mol_type = other RNA
cctgaaaatatccttgttga

SEQ ID NO: 7723 - RNA, 20 nt, synthetic construct
  source 1..20: mol_type = other RNA
ctgaaaatatccttgttgat

SEQ ID NO: 7724 - RNA, 20 nt, synthetic construct
  source 1..20: mol_type = other RNA
tgaaaatatccttgttgata

SEQ ID NO: 7725 - RNA, 20 nt, synthetic construct
  source 1..20: mol_type = other RNA
aaaatatccttgttgataat

SEQ ID NO: 7726 - RNA, 20 nt, synthetic construct
  source 1..20: mol_type = other RNA
gatcatgaaaacagtgtaca

SEQ ID NO: 7727 - RNA, 20 nt, synthetic construct
  source 1..20: mol_type = other RNA
atcatgaaaacagtgtacaa

SEQ ID NO: 7728 - RNA, 20 nt, synthetic construct
  source 1..20: mol_type = other RNA
tcatgaaaacagtgtacaag

SEQ ID NO: 7729 - RNA, 20 nt, synthetic construct
  source 1..20: mol_type = other RNA
catgaaaacagtgtacaagg

SEQ ID NO: 7730 - RNA, 20 nt, synthetic construct
  source 1..20: mol_type = other RNA
atgaaaacagtgtacaaggg

SEQ ID NO: 7731 - RNA, 20 nt, synthetic construct
  source 1..20: mol_type = other RNA
tgaaaacagtgtacaagggg

SEQ ID NO: 7732 - RNA, 20 nt, synthetic construct
  source 1..20: mol_type = other RNA
gaaaacagtgtacaaggggc

SEQ ID NO: 7733 - RNA, 20 nt, synthetic construct
  source 1..20: mol_type = other RNA
catcatgacttgaagactca

SEQ ID NO: 7734 - RNA, 20 nt, synthetic construct
  source 1..20: mol_type = other RNA
atcatgacttgaagactcag

SEQ ID NO: 7735 - RNA, 20 nt, synthetic construct
  source 1..20: mol_type = other RNA
tcatgacttgaagactcaga

SEQ ID NO: 7736 - RNA, 20 nt, synthetic construct
  source 1..20: mol_type = other RNA
catgacttgaagactcagaa

SEQ ID NO: 7737 - RNA, 20 nt, synthetic construct
  source 1..20: mol_type = other RNA
atgacttgaagactcagaat

SEQ ID NO: 7738 - RNA, 20 nt, synthetic construct
  source 1..20: mol_type = other RNA
cagaatatcttattggacaa

SEQ ID NO: 7739 - RNA, 20 nt, synthetic construct
  source 1..20: mol_type = other RNA
gactcagaatatcttattgg

SEQ ID NO: 7740 - RNA, 20 nt, synthetic construct
  source 1..20: mol_type = other RNA
actcagaatatcttattgga

SEQ ID NO: 7741 - RNA, 20 nt, synthetic construct
  source 1..20: mol_type = other RNA
ctcagaatatcttattggac

SEQ ID NO: 7742 - RNA, 20 nt, synthetic construct
  source 1..20: mol_type = other RNA
tcagaatatcttattggaca

SEQ ID NO: 7743 - RNA, 20 nt, synthetic construct
  source 1..20: mol_type = other RNA
agaatatcttattggacaat

SEQ ID NO: 7744 - RNA, 20 nt, synthetic construct
  source 1..20: mol_type = other RNA
ggccgtgaagcacctgcaca

SEQ ID NO: 7745 - RNA, 20 nt, synthetic construct
  source 1..20: mol_type = other RNA
gccgtgaagcacctgcacat

SEQ ID NO: 7746 - RNA, 20 nt, synthetic construct
  source 1..20: mol_type = other RNA
ccgtgaagcacctgcacatc

SEQ ID NO: 7747 - RNA, 20 nt, synthetic construct
  source 1..20: mol_type = other RNA
cgtgaagcacctgcacatcc

SEQ ID NO: 7748 - RNA, 20 nt, synthetic construct
  source 1..20: mol_type = other RNA
gtgaagcacctgcacatcca

SEQ ID NO: 7749 - RNA, 20 nt, synthetic construct
  source 1..20: mol_type = other RNA
tgaagcacctgcacatccac

SEQ ID NO: 7750 - RNA, 20 nt, synthetic construct
  source 1..20: mol_type = other RNA
cgggacctcaagccatccaa

SEQ ID NO: 7751 - RNA, 20 nt, synthetic construct
  source 1..20: mol_type = other RNA
gggacctcaagccatccaac

SEQ ID NO: 7752 - RNA, 20 nt, synthetic construct
  source 1..20: mol_type = other RNA
ccgggacctcaagccatcca

SEQ ID NO: 7753 - RNA, 20 nt, synthetic construct
  source 1..20: mol_type = other RNA
accgggacctcaagccatcc

SEQ ID NO: 7754 - RNA, 20 nt, synthetic construct
  source 1..20: mol_type = other RNA
caccgggacctcaagccatc

SEQ ID NO: 7755 - RNA, 20 nt, synthetic construct
  source 1..20: mol_type = other RNA
tccaacgtcctgctggaccc

SEQ ID NO: 7756 - RNA, 20 nt, synthetic construct
  source 1..20: mol_type = other RNA
ccaacgtcctgctggaccca

SEQ ID NO: 7757 - RNA, 20 nt, synthetic construct
  source 1..20: mol_type = other RNA
atccaacgtcctgctggacc

SEQ ID NO: 7758 - RNA, 20 nt, synthetic construct
  source 1..20: mol_type = other RNA
catccaacgtcctgctggac

SEQ ID NO: 7759 - RNA, 20 nt, synthetic construct
  source 1..20: mol_type = other RNA
ccatccaacgtcctgctgga

SEQ ID NO: 7760 - RNA, 20 nt, synthetic construct
  source 1..20: mol_type = other RNA
gccatccaacgtcctgctgg

SEQ ID NO: 7761 - RNA, 20 nt, synthetic construct
  source 1..20: mol_type = other RNA
gtcaagatcgtaaactcgtg

SEQ ID NO: 7762 - RNA, 20 nt, synthetic construct
  source 1..20: mol_type = other RNA
cggtcaagatcgtaaactcg

SEQ ID NO: 7763 - RNA, 20 nt, synthetic construct
  source 1..20: mol_type = other RNA
ggcggtcaagatcgtaaact

SEQ ID NO: 7764 - RNA, 20 nt, synthetic construct
  source 1..20: mol_type = other RNA
tcaagatcgtaaactcgtga

SEQ ID NO: 7765 - RNA, 20 nt, synthetic construct
  source 1..20: mol_type = other RNA
ggtcaagatcgtaaactcgt

SEQ ID NO: 7766 - RNA, 20 nt, synthetic construct
  source 1..20: mol_type = other RNA
gcggtcaagatcgtaaactc

SEQ ID NO: 7767 - RNA, 20 nt, synthetic construct
  source 1..20: mol_type = other RNA
tggacctcaagcccgcgaac

SEQ ID NO: 7768 - RNA, 20 nt, synthetic construct
  source 1..20: mol_type = other RNA
ctggacctcaagcccgcgaa

SEQ ID NO: 7769 - RNA, 20 nt, synthetic construct
  source 1..20: mol_type = other RNA
cctggacctcaagcccgcga

SEQ ID NO: 7770 - RNA, 20 nt, synthetic construct
  source 1..20: mol_type = other RNA
acctggacctcaagcccgcg

SEQ ID NO: 7771 - RNA, 20 nt, synthetic construct
  source 1..20: mol_type = other RNA
cacctggacctcaagcccgc

SEQ ID NO: 7772 - RNA, 20 nt, synthetic construct
  source 1..20: mol_type = other RNA
cccgcgaacatcctgctgga

SEQ ID NO: 7773 - RNA, 20 nt, synthetic construct
  source 1..20: mol_type = other RNA
cgaacatcctgctggatgcc

SEQ ID NO: 7774 - RNA, 20 nt, synthetic construct
  source 1..20: mol_type = other RNA
gcgaacatcctgctggatgc

SEQ ID NO: 7775 - RNA, 20 nt, synthetic construct
  source 1..20: mol_type = other RNA
cgcgaacatcctgctggatg

SEQ ID NO: 7776 - RNA, 20 nt, synthetic construct
  source 1..20: mol_type = other RNA
ccgcgaacatcctgctggat

SEQ ID NO: 7777 - RNA, 20 nt, synthetic construct
  source 1..20: mol_type = other RNA
gcccgcgaacatcctgctgg

SEQ ID NO: 7778 - RNA, 20 nt, synthetic construct
  source 1..20: mol_type = other RNA
catcaagtgctcgcccagcc

SEQ ID NO: 7779 - RNA, 20 nt, synthetic construct
  source 1..20: mol_type = other RNA
tcaagtgctcgcccagcctg

SEQ ID NO: 7780 - RNA, 20 nt, synthetic construct
  source 1..20: mol_type = other RNA
atcaagtgctcgcccagcct

SEQ ID NO: 7781 - RNA, 20 nt, synthetic construct
  source 1..20: mol_type = other RNA
ccatcaagtgctcgcccagc

SEQ ID NO: 7782 - RNA, 20 nt, synthetic construct
  source 1..20: mol_type = other RNA
gccatcaagtgctcgcccag

SEQ ID NO: 7783 - RNA, 20 nt, synthetic construct
  source 1..20: mol_type = other RNA
ggccatcaagtgctcgccca

SEQ ID NO: 7784 - RNA, 20 nt, synthetic construct
  source 1..20: mol_type = other RNA
aggatctgcaaccacaaaac

SEQ ID NO: 7785 - RNA, 20 nt, synthetic construct
  source 1..20: mol_type = other RNA
caggatctgcaaccacaaaa

SEQ ID NO: 7786 - RNA, 20 nt, synthetic construct
  source 1..20: mol_type = other RNA
ccaggatctgcaaccacaaa

SEQ ID NO: 7787 - RNA, 20 nt, synthetic construct
  source 1..20: mol_type = other RNA
accaggatctgcaaccacaa

SEQ ID NO: 7788 - RNA, 20 nt, synthetic construct
  source 1..20: mol_type = other RNA
caccaggatctgcaaccaca

SEQ ID NO: 7789 - RNA, 20 nt, synthetic construct
  source 1..20: mol_type = other RNA
acaaaacatcttaataggtg

SEQ ID NO: 7790 - RNA, 20 nt, synthetic construct
  source 1..20: mol_type = other RNA
ccacaaaacatcttaatagg

SEQ ID NO: 7791 - RNA, 20 nt, synthetic construct
  source 1..20: mol_type = other RNA
aaaacatcttaataggtgag

SEQ ID NO: 7792 - RNA, 20 nt, synthetic construct
  source 1..20: mol_type = other RNA
caaaacatcttaataggtga

SEQ ID NO: 7793 - RNA, 20 nt, synthetic construct
  source 1..20: mol_type = other RNA
cacaaaacatcttaataggt

SEQ ID NO: 7794 - RNA, 20 nt, synthetic construct
  source 1..20: mol_type = other RNA
accacaaaacatcttaatag

SEQ ID NO: 7795 - RNA, 20 nt, synthetic construct
  source 1..20: mol_type = other RNA
tgaagacgttctgtgagggc

SEQ ID NO: 7796 - RNA, 20 nt, synthetic construct
  source 1..20: mol_type = other RNA
ctgtgaagacgttctgtgag

SEQ ID NO: 7797 - RNA, 20 nt, synthetic construct
  source 1..20: mol_type = other RNA
gctgtgaagacgttctgtga

SEQ ID NO: 7798 - RNA, 20 nt, synthetic construct
  source 1..20: mol_type = other RNA
agctgtgaagacgttctgtg

SEQ ID NO: 7799 - RNA, 20 nt, synthetic construct
  source 1..20: mol_type = other RNA
gtgaagacgttctgtgaggg

SEQ ID NO: 7800 - RNA, 20 nt, synthetic construct
  source 1..20: mol_type = other RNA
tgtgaagacgttctgtgagg

SEQ ID NO: 7801 - RNA, 20 nt, synthetic construct
  source 1..20: mol_type = other RNA
gagatgtgaagcctgataac

SEQ ID NO: 7802 - RNA, 20 nt, synthetic construct
  source 1..20: mol_type = other RNA
agagatgtgaagcctgataa

SEQ ID NO: 7803 - RNA, 20 nt, synthetic construct
  source 1..20: mol_type = other RNA
cagagatgtgaagcctgata

SEQ ID NO: 7804 - RNA, 20 nt, synthetic construct
  source 1..20: mol_type = other RNA
gcagagatgtgaagcctgat

SEQ ID NO: 7805 - RNA, 20 nt, synthetic construct
  source 1..20: mol_type = other RNA
tgcagagatgtgaagcctga

SEQ ID NO: 7806 - RNA, 20 nt, synthetic construct
  source 1..20: mol_type = other RNA
ataacatgctgctggataaa

SEQ ID NO: 7807 - RNA, 20 nt, synthetic construct
  source 1..20: mol_type = other RNA
gataacatgctgctggataa

SEQ ID NO: 7808 - RNA, 20 nt, synthetic construct
  source 1..20: mol_type = other RNA
tgataacatgctgctggata

SEQ ID NO: 7809 - RNA, 20 nt, synthetic construct
  source 1..20: mol_type = other RNA
ctgataacatgctgctggat

SEQ ID NO: 7810 - RNA, 20 nt, synthetic construct
  source 1..20: mol_type = other RNA
cctgataacatgctgctgga

SEQ ID NO: 7811 - RNA, 20 nt, synthetic construct
  source 1..20: mol_type = other RNA
gcctgataacatgctgctgg

SEQ ID NO: 7812 - RNA, 20 nt, synthetic construct
  source 1..20: mol_type = other RNA
atgaagcttctcagcaaatt

SEQ ID NO: 7813 - RNA, 20 nt, synthetic construct
  source 1..20: mol_type = other RNA
tgaagcttctcagcaaattt

SEQ ID NO: 7814 - RNA, 20 nt, synthetic construct
  source 1..20: mol_type = other RNA
tatgaagcttctcagcaaat

SEQ ID NO: 7815 - RNA, 20 nt, synthetic construct
  source 1..20: mol_type = other RNA
ctatgaagcttctcagcaaa

SEQ ID NO: 7816 - RNA, 20 nt, synthetic construct
  source 1..20: mol_type = other RNA
gctatgaagcttctcagcaa

SEQ ID NO: 7817 - RNA, 20 nt, synthetic construct
  source 1..20: mol_type = other RNA
tgctatgaagcttctcagca

SEQ ID NO: 7818 - RNA, 20 nt, synthetic construct
  source 1..20: mol_type = other RNA
gagatgtgaagcctgacaac

SEQ ID NO: 7819 - RNA, 20 nt, synthetic construct
  source 1..20: mol_type = other RNA
agagatgtgaagcctgacaa

SEQ ID NO: 7820 - RNA, 20 nt, synthetic construct
  source 1..20: mol_type = other RNA
cagagatgtgaagcctgaca

SEQ ID NO: 7821 - RNA, 20 nt, synthetic construct
  source 1..20: mol_type = other RNA
acagagatgtgaagcctgac

SEQ ID NO: 7822 - RNA, 20 nt, synthetic construct
  source 1..20: mol_type = other RNA
cacagagatgtgaagcctga

SEQ ID NO: 7823 - RNA, 20 nt, synthetic construct
  source 1..20: mol_type = other RNA
acaacatgctcttggataaa

SEQ ID NO: 7824 - RNA, 20 nt, synthetic construct
  source 1..20: mol_type = other RNA
gacaacatgctcttggataa

SEQ ID NO: 7825 - RNA, 20 nt, synthetic construct
  source 1..20: mol_type = other RNA
tgacaacatgctcttggata

SEQ ID NO: 7826 - RNA, 20 nt, synthetic construct
  source 1..20: mol_type = other RNA
ctgacaacatgctcttggat

SEQ ID NO: 7827 - RNA, 20 nt, synthetic construct
  source 1..20: mol_type = other RNA
cctgacaacatgctcttgga

SEQ ID NO: 7828 - RNA, 20 nt, synthetic construct
  source 1..20: mol_type = other RNA
gcctgacaacatgctcttgg

SEQ ID NO: 7829 - RNA, 20 nt, synthetic construct
  source 1..20: mol_type = other RNA
atgaagcttcttagtaagtt

SEQ ID NO: 7830 - RNA, 20 nt, synthetic construct
  source 1..20: mol_type = other RNA
tgctatgaagcttcttagta

SEQ ID NO: 7831 - RNA, 20 nt, synthetic construct
  source 1..20: mol_type = other RNA
tgaagcttcttagtaagttt

SEQ ID NO: 7832 - RNA, 20 nt, synthetic construct
  source 1..20: mol_type = other RNA
tatgaagcttcttagtaagt

SEQ ID NO: 7833 - RNA, 20 nt, synthetic construct
  source 1..20: mol_type = other RNA
ctatgaagcttcttagtaag

SEQ ID NO: 7834 - RNA, 20 nt, synthetic construct
  source 1..20: mol_type = other RNA
gctatgaagcttcttagtaa

SEQ ID NO: 7835 - RNA, 20 nt, synthetic construct
  source 1..20: mol_type = other RNA
tttcagacttggggctttcc

SEQ ID NO: 7836 - RNA, 20 nt, synthetic construct
  source 1..20: mol_type = other RNA
tcagacttggggctttccag

SEQ ID NO: 7837 - RNA, 20 nt, synthetic construct
  source 1..20: mol_type = other RNA
atttcagacttggggctttc

SEQ ID NO: 7838 - RNA, 20 nt, synthetic construct
  source 1..20: mol_type = other RNA
ttcagacttggggctttcca

SEQ ID NO: 7839 - RNA, 20 nt, synthetic construct
  source 1..20: mol_type = other RNA
cagacttggggctttccaga

SEQ ID NO: 7840 - RNA, 20 nt, synthetic construct
  source 1..20: mol_type = other RNA
cacaaggaccttgcagctcg

SEQ ID NO: 7841 - RNA, 20 nt, synthetic construct
  source 1..20: mol_type = other RNA
acaaggaccttgcagctcgc

SEQ ID NO: 7842 - RNA, 20 nt, synthetic construct
  source 1..20: mol_type = other RNA
caaggaccttgcagctcgca

SEQ ID NO: 7843 - RNA, 20 nt, synthetic construct
  source 1..20: mol_type = other RNA
aaggaccttgcagctcgcaa

SEQ ID NO: 7844 - RNA, 20 nt, synthetic construct
  source 1..20: mol_type = other RNA
aggaccttgcagctcgcaat

SEQ ID NO: 7845 - RNA, 20 nt, synthetic construct
  source 1..20: mol_type = other RNA
tgctatcaagaccttgaaag

SEQ ID NO: 7846 - RNA, 20 nt, synthetic construct
  source 1..20: mol_type = other RNA
gctatcaagaccttgaaaga

SEQ ID NO: 7847 - RNA, 20 nt, synthetic construct
  source 1..20: mol_type = other RNA
ctatcaagaccttgaaagac

SEQ ID NO: 7848 - RNA, 20 nt, synthetic construct
  source 1..20: mol_type = other RNA
tatcaagaccttgaaagact

SEQ ID NO: 7849 - RNA, 20 nt, synthetic construct
  source 1..20: mol_type = other RNA
atcaagaccttgaaagacta

SEQ ID NO: 7850 - RNA, 20 nt, synthetic construct
  source 1..20: mol_type = other RNA
tcaagaccttgaaagactat

SEQ ID NO: 7851 - RNA, 20 nt, synthetic construct
  source 1..20: mol_type = other RNA
tcagacttgggcctcttccg

SEQ ID NO: 7852 - RNA, 20 nt, synthetic construct
  source 1..20: mol_type = other RNA
tctcagacttgggcctcttc

SEQ ID NO: 7853 - RNA, 20 nt, synthetic construct
  source 1..20: mol_type = other RNA
cagacttgggcctcttccga

SEQ ID NO: 7854 - RNA, 20 nt, synthetic construct
  source 1..20: mol_type = other RNA
ctcagacttgggcctcttcc

SEQ ID NO: 7855 - RNA, 20 nt, synthetic construct
  source 1..20: mol_type = other RNA
atctcagacttgggcctctt

SEQ ID NO: 7856 - RNA, 20 nt, synthetic construct
  source 1..20: mol_type = other RNA
aaggacctggccacccgcaa

SEQ ID NO: 7857 - RNA, 20 nt, synthetic construct
  source 1..20: mol_type = other RNA
aggacctggccacccgcaat

SEQ ID NO: 7858 - RNA, 20 nt, synthetic construct
  source 1..20: mol_type = other RNA
caaggacctggccacccgca

SEQ ID NO: 7859 - RNA, 20 nt, synthetic construct
  source 1..20: mol_type = other RNA
acaaggacctggccacccgc

SEQ ID NO: 7860 - RNA, 20 nt, synthetic construct
  source 1..20: mol_type = other RNA
cacaaggacctggccacccg

SEQ ID NO: 7861 - RNA, 20 nt, synthetic construct
  source 1..20: mol_type = other RNA
acccgcaatgtgctagtgta

SEQ ID NO: 7862 - RNA, 20 nt, synthetic construct
  source 1..20: mol_type = other RNA
gcaatgtgctagtgtacgac

SEQ ID NO: 7863 - RNA, 20 nt, synthetic construct
  source 1..20: mol_type = other RNA
cgcaatgtgctagtgtacga

SEQ ID NO: 7864 - RNA, 20 nt, synthetic construct
  source 1..20: mol_type = other RNA
ccgcaatgtgctagtgtacg

SEQ ID NO: 7865 - RNA, 20 nt, synthetic construct
  source 1..20: mol_type = other RNA
cccgcaatgtgctagtgtac

SEQ ID NO: 7866 - RNA, 20 nt, synthetic construct
  source 1..20: mol_type = other RNA
cacccgcaatgtgctagtgt

SEQ ID NO: 7867 - RNA, 20 nt, synthetic construct
  source 1..20: mol_type = other RNA
caaaacgctgaaggacaaag

SEQ ID NO: 7868 - RNA, 20 nt, synthetic construct
  source 1..20: mol_type = other RNA
atcaaaacgctgaaggacaa

SEQ ID NO: 7869 - RNA, 20 nt, synthetic construct
  source 1..20: mol_type = other RNA
tcaaaacgctgaaggacaaa

SEQ ID NO: 7870 - RNA, 20 nt, synthetic construct
  source 1..20: mol_type = other RNA
catcaaaacgctgaaggaca

SEQ ID NO: 7871 - RNA, 20 nt, synthetic construct
  source 1..20: mol_type = other RNA
ccatcaaaacgctgaaggac

SEQ ID NO: 7872 - RNA, 20 nt, synthetic construct
  source 1..20: mol_type = other RNA
gccatcaaaacgctgaagga

SEQ ID NO: 7873 - RNA, 20 nt, synthetic construct
  source 1..20: mol_type = other RNA
ggccatcaaaacgctgaagg

SEQ ID NO: 7874 - RNA, 20 nt, synthetic construct
  source 1..20: mol_type = other RNA
ggagactttggactcgccag

SEQ ID NO: 7875 - RNA, 20 nt, synthetic construct
  source 1..20: mol_type = other RNA
ttggagactttggactcgcc

SEQ ID NO: 7876 - RNA, 20 nt, synthetic construct
  source 1..20: mol_type = other RNA
gagactttggactcgccaga

SEQ ID NO: 7877 - RNA, 20 nt, synthetic construct
  source 1..20: mol_type = other RNA
tggagactttggactcgcca

SEQ ID NO: 7878 - RNA, 20 nt, synthetic construct
  source 1..20: mol_type = other RNA
attggagactttggactcgc

SEQ ID NO: 7879 - RNA, 20 nt, synthetic construct
  source 1..20: mol_type = other RNA
gggatctggcagctagaaat

SEQ ID NO: 7880 - RNA, 20 nt, synthetic construct
  source 1..20: mol_type = other RNA
agggatctggcagctagaaa

SEQ ID NO: 7881 - RNA, 20 nt, synthetic construct
  source 1..20: mol_type = other RNA
cagggatctggcagctagaa

SEQ ID NO: 7882 - RNA, 20 nt, synthetic construct
  source 1..20: mol_type = other RNA
acagggatctggcagctaga

SEQ ID NO: 7883 - RNA, 20 nt, synthetic construct
  source 1..20: mol_type = other RNA
cacagggatctggcagctag

SEQ ID NO: 7884 - RNA, 20 nt, synthetic construct
  source 1..20: mol_type = other RNA
tagaaattgccttgtttccg

SEQ ID NO: 7885 - RNA, 20 nt, synthetic construct
  source 1..20: mol_type = other RNA
gctagaaattgccttgtttc

SEQ ID NO: 7886 - RNA, 20 nt, synthetic construct
  source 1..20: mol_type = other RNA
gaaattgccttgtttccgtg

SEQ ID NO: 7887 - RNA, 20 nt, synthetic construct
  source 1..20: mol_type = other RNA
agaaattgccttgtttccgt

SEQ ID NO: 7888 - RNA, 20 nt, synthetic construct
  source 1..20: mol_type = other RNA
ctagaaattgccttgtttcc

SEQ ID NO: 7889 - RNA, 20 nt, synthetic construct
  source 1..20: mol_type = other RNA
agctagaaattgccttgttt

SEQ ID NO: 7890 - RNA, 20 nt, synthetic construct
  source 1..20: mol_type = other RNA
gtgaaggtaatgtgaatctt

SEQ ID NO: 7891 - RNA, 20 nt, synthetic construct
  source 1..20: mol_type = other RNA
tgaaggtaatgtgaatcttc

SEQ ID NO: 7892 - RNA, 20 nt, synthetic construct
  source 1..20: mol_type = other RNA
agtgaaggtaatgtgaatct

SEQ ID NO: 7893 - RNA, 20 nt, synthetic construct
  source 1..20: mol_type = other RNA
cagtgaaggtaatgtgaatc

SEQ ID NO: 7894 - RNA, 20 nt, synthetic construct
  source 1..20: mol_type = other RNA
gcagtgaaggtaatgtgaat

SEQ ID NO: 7895 - RNA, 20 nt, synthetic construct
  source 1..20: mol_type = other RNA
agcagtgaaggtaatgtgaa

SEQ ID NO: 7896 - RNA, 20 nt, synthetic construct
  source 1..20: mol_type = other RNA
gtagactttggcctgagcaa

SEQ ID NO: 7897 - RNA, 20 nt, synthetic construct
  source 1..20: mol_type = other RNA
gctgtagactttggcctgag

SEQ ID NO: 7898 - RNA, 20 nt, synthetic construct
  source 1..20: mol_type = other RNA
ctgtagactttggcctgagc

SEQ ID NO: 7899 - RNA, 20 nt, synthetic construct
  source 1..20: mol_type = other RNA
tgtagactttggcctgagca

SEQ ID NO: 7900 - RNA, 20 nt, synthetic construct
  source 1..20: mol_type = other RNA
tagactttggcctgagcaaa

SEQ ID NO: 7901 - RNA, 20 nt, synthetic construct
  source 1..20: mol_type = other RNA
cagagacctcaagcctgaga

SEQ ID NO: 7902 - RNA, 20 nt, synthetic construct
  source 1..20: mol_type = other RNA
gagacctcaagcctgagaag

SEQ ID NO: 7903 - RNA, 20 nt, synthetic construct
  source 1..20: mol_type = other RNA
tacagagacctcaagcctga

SEQ ID NO: 7904 - RNA, 20 nt, synthetic construct
  source 1..20: mol_type = other RNA
acagagacctcaagcctgag

SEQ ID NO: 7905 - RNA, 20 nt, synthetic construct
  source 1..20: mol_type = other RNA
agagacctcaagcctgagaa

SEQ ID NO: 7906 - RNA, 20 nt, synthetic construct
  source 1..20: mol_type = other RNA
cacagggacctgaagcccag

SEQ ID NO: 7907 - RNA, 20 nt, synthetic construct
  source 1..20: mol_type = other RNA
acagggacctgaagcccagc

SEQ ID NO: 7908 - RNA, 20 nt, synthetic construct
  source 1..20: mol_type = other RNA
cagggacctgaagcccagca

SEQ ID NO: 7909 - RNA, 20 nt, synthetic construct
  source 1..20: mol_type = other RNA
agggacctgaagcccagcaa

SEQ ID NO: 7910 - RNA, 20 nt, synthetic construct
  source 1..20: mol_type = other RNA
gggacctgaagcccagcaac

SEQ ID NO: 7911 - RNA, 20 nt, synthetic construct
  source 1..20: mol_type = other RNA
gagaagtgagtgaagcctcc

SEQ ID NO: 7912 - RNA, 20 nt, synthetic construct
  source 1..20: mol_type = other RNA
gcctgagaagtgagtgaagc

SEQ ID NO: 7913 - RNA, 20 nt, synthetic construct
  source 1..20: mol_type = other RNA
cctgagaagtgagtgaagcc

SEQ ID NO: 7914 - RNA, 20 nt, synthetic construct
  source 1..20: mol_type = other RNA
ctgagaagtgagtgaagcct

SEQ ID NO: 7915 - RNA, 20 nt, synthetic construct
  source 1..20: mol_type = other RNA
tgagaagtgagtgaagcctc

SEQ ID NO: 7916 - RNA, 20 nt, synthetic construct
  source 1..20: mol_type = other RNA
agaagtgagtgaagcctcca

SEQ ID NO: 7917 - RNA, 20 nt, synthetic construct
  source 1..20: mol_type = other RNA
gcccagcaacatcctgtatg

SEQ ID NO: 7918 - RNA, 20 nt, synthetic construct
  source 1..20: mol_type = other RNA
cccagcaacatcctgtatgt

SEQ ID NO: 7919 - RNA, 20 nt, synthetic construct
  source 1..20: mol_type = other RNA
agcaacatcctgtatgtgga

SEQ ID NO: 7920 - RNA, 20 nt, synthetic construct
  source 1..20: mol_type = other RNA
ccagcaacatcctgtatgtg

SEQ ID NO: 7921 - RNA, 20 nt, synthetic construct
  source 1..20: mol_type = other RNA
cagcaacatcctgtatgtgg

SEQ ID NO: 7922 - RNA, 20 nt, synthetic construct
  source 1..20: mol_type = other RNA
gcaacatcctgtatgtggac

SEQ ID NO: 7923 - RNA, 20 nt, synthetic construct
  source 1..20: mol_type = other RNA
tgctatgaaggtgctgaaga

SEQ ID NO: 7924 - RNA, 20 nt, synthetic construct
  source 1..20: mol_type = other RNA
gctatgaaggtgctgaagaa

SEQ ID NO: 7925 - RNA, 20 nt, synthetic construct
  source 1..20: mol_type = other RNA
ctatgaaggtgctgaagaag

SEQ ID NO: 7926 - RNA, 20 nt, synthetic construct
  source 1..20: mol_type = other RNA
tatgaaggtgctgaagaagg

SEQ ID NO: 7927 - RNA, 20 nt, synthetic construct
  source 1..20: mol_type = other RNA
atgaaggtgctgaagaaggc

SEQ ID NO: 7928 - RNA, 20 nt, synthetic construct
  source 1..20: mol_type = other RNA
tgaaggtgctgaagaaggca

SEQ ID NO: 7929 - RNA, 20 nt, synthetic construct
  source 1..20: mol_type = other RNA
tgctgtcaaggtgggcctcc

SEQ ID NO: 7930 - RNA, 20 nt, synthetic construct
  source 1..20: mol_type = other RNA
gctgtcaaggtgggcctcct

SEQ ID NO: 7931 - RNA, 20 nt, synthetic construct
  source 1..20: mol_type = other RNA
ctgtcaaggtgggcctcctg

SEQ ID NO: 7932 - RNA, 20 nt, synthetic construct
  source 1..20: mol_type = other RNA
tgtcaaggtgggcctcctga

SEQ ID NO: 7933 - RNA, 20 nt, synthetic construct
  source 1..20: mol_type = other RNA
gtcaaggtgggcctcctgac

SEQ ID NO: 7934 - RNA, 20 nt, synthetic construct
  source 1..20: mol_type = other RNA
tcaaggtgggcctcctgacc

SEQ ID NO: 7935 - RNA, 20 nt, synthetic construct
  source 1..20: mol_type = other RNA
ctgcgacttcggctttgcca

SEQ ID NO: 7936 - RNA, 20 nt, synthetic construct
  source 1..20: mol_type = other RNA
gcgacttcggctttgccaag

SEQ ID NO: 7937 - RNA, 20 nt, synthetic construct
  source 1..20: mol_type = other RNA
tgcgacttcggctttgccaa

SEQ ID NO: 7938 - RNA, 20 nt, synthetic construct
  source 1..20: mol_type = other RNA
tctgcgacttcggctttgcc

SEQ ID NO: 7939 - RNA, 20 nt, synthetic construct
  source 1..20: mol_type = other RNA
gtctgcgacttcggctttgc

SEQ ID NO: 7940 - RNA, 20 nt, synthetic construct
  source 1..20: mol_type = other RNA
gtagatttcggcctgagtaa

SEQ ID NO: 7941 - RNA, 20 nt, synthetic construct
  source 1..20: mol_type = other RNA
tgtagatttcggcctgagta

SEQ ID NO: 7942 - RNA, 20 nt, synthetic construct
  source 1..20: mol_type = other RNA
tagatttcggcctgagtaag

SEQ ID NO: 7943 - RNA, 20 nt, synthetic construct
  source 1..20: mol_type = other RNA
atgtagatttcggcctgagt

SEQ ID NO: 7944 - RNA, 20 nt, synthetic construct
  source 1..20: mol_type = other RNA
catgtagatttcggcctgag

SEQ ID NO: 7945 - RNA, 20 nt, synthetic construct
  source 1..20: mol_type = other RNA
gagacctgaagccgagtaac

SEQ ID NO: 7946 - RNA, 20 nt, synthetic construct
  source 1..20: mol_type = other RNA
cgagacctgaagccgagtaa

SEQ ID NO: 7947 - RNA, 20 nt, synthetic construct
  source 1..20: mol_type = other RNA
tcgagacctgaagccgagta

SEQ ID NO: 7948 - RNA, 20 nt, synthetic construct
  source 1..20: mol_type = other RNA
atcgagacctgaagccgagt

SEQ ID NO: 7949 - RNA, 20 nt, synthetic construct
  source 1..20: mol_type = other RNA
catcgagacctgaagccgag

SEQ ID NO: 7950 - RNA, 20 nt, synthetic construct
  source 1..20: mol_type = other RNA
cagagatctgaagcctgaga

SEQ ID NO: 7951 - RNA, 20 nt, synthetic construct
  source 1..20: mol_type = other RNA
gagatctgaagcctgagaag

SEQ ID NO: 7952 - RNA, 20 nt, synthetic construct
  source 1..20: mol_type = other RNA
agagatctgaagcctgagaa

SEQ ID NO: 7953 - RNA, 20 nt, synthetic construct
  source 1..20: mol_type = other RNA
acagagatctgaagcctgag

SEQ ID NO: 7954 - RNA, 20 nt, synthetic construct
  source 1..20: mol_type = other RNA
tacagagatctgaagcctga

SEQ ID NO: 7955 - RNA, 20 nt, synthetic construct
  source 1..20: mol_type = other RNA
agtaacatcctgtacaggga

SEQ ID NO: 7956 - RNA, 20 nt, synthetic construct
  source 1..20: mol_type = other RNA
ccgagtaacatcctgtacag

SEQ ID NO: 7957 - RNA, 20 nt, synthetic construct
  source 1..20: mol_type = other RNA
gccgagtaacatcctgtaca

SEQ ID NO: 7958 - RNA, 20 nt, synthetic construct
  source 1..20: mol_type = other RNA
gtaacatcctgtacagggat

SEQ ID NO: 7959 - RNA, 20 nt, synthetic construct
  source 1..20: mol_type = other RNA
gagtaacatcctgtacaggg

SEQ ID NO: 7960 - RNA, 20 nt, synthetic construct
  source 1..20: mol_type = other RNA
cgagtaacatcctgtacagg

SEQ ID NO: 7961 - RNA, 20 nt, synthetic construct
  source 1..20: mol_type = other RNA
ctgagaagtaagtgagaaaa

SEQ ID NO: 7962 - RNA, 20 nt, synthetic construct
  source 1..20: mol_type = other RNA
cctgagaagtaagtgagaaa

SEQ ID NO: 7963 - RNA, 20 nt, synthetic construct
  source 1..20: mol_type = other RNA
gcctgagaagtaagtgagaa

SEQ ID NO: 7964 - RNA, 20 nt, synthetic construct
  source 1..20: mol_type = other RNA
tgaaggtaaggcaggcctgc

SEQ ID NO: 7965 - RNA, 20 nt, synthetic construct
  source 1..20: mol_type = other RNA
ccgtgaaggtaaggcaggcc

SEQ ID NO: 7966 - RNA, 20 nt, synthetic construct
  source 1..20: mol_type = other RNA
gtgaaggtaaggcaggcctg

SEQ ID NO: 7967 - RNA, 20 nt, synthetic construct
  source 1..20: mol_type = other RNA
cgtgaaggtaaggcaggcct

SEQ ID NO: 7968 - RNA, 20 nt, synthetic construct
  source 1..20: mol_type = other RNA
gccgtgaaggtaaggcaggc

SEQ ID NO: 7969 - RNA, 20 nt, synthetic construct
  source 1..20: mol_type = other RNA
tgccgtgaaggtaaggcagg

SEQ ID NO: 7970 - RNA, 20 nt, synthetic construct
  source 1..20: mol_type = other RNA
gccatgaaggtccttaagaa

SEQ ID NO: 7971 - RNA, 20 nt, synthetic construct
  source 1..20: mol_type = other RNA
tgaaggtccttaagaaagcc

SEQ ID NO: 7972 - RNA, 20 nt, synthetic construct
  source 1..20: mol_type = other RNA
atgaaggtccttaagaaagc

SEQ ID NO: 7973 - RNA, 20 nt, synthetic construct
  source 1..20: mol_type = other RNA
catgaaggtccttaagaaag

SEQ ID NO: 7974 - RNA, 20 nt, synthetic construct
  source 1..20: mol_type = other RNA
ccatgaaggtccttaagaaa

SEQ ID NO: 7975 - RNA, 20 nt, synthetic construct
  source 1..20: mol_type = other RNA
cgccatgaaggtccttaaga

SEQ ID NO: 7976 - RNA, 20 nt, synthetic construct
  source 1..20: mol_type = other RNA
gcagatttcggcctaagtaa

SEQ ID NO: 7977 - RNA, 20 nt, synthetic construct
  source 1..20: mol_type = other RNA
cagatttcggcctaagtaaa

SEQ ID NO: 7978 - RNA, 20 nt, synthetic construct
  source 1..20: mol_type = other RNA
ggcagatttcggcctaagta

SEQ ID NO: 7979 - RNA, 20 nt, synthetic construct
  source 1..20: mol_type = other RNA
tggcagatttcggcctaagt

SEQ ID NO: 7980 - RNA, 20 nt, synthetic construct
  source 1..20: mol_type = other RNA
ttggcagatttcggcctaag

SEQ ID NO: 7981 - RNA, 20 nt, synthetic construct
  source 1..20: mol_type = other RNA
gagacttgaaacctagcaac

SEQ ID NO: 7982 - RNA, 20 nt, synthetic construct
  source 1..20: mol_type = other RNA
agagacttgaaacctagcaa

SEQ ID NO: 7983 - RNA, 20 nt, synthetic construct
  source 1..20: mol_type = other RNA
tagagacttgaaacctagca

SEQ ID NO: 7984 - RNA, 20 nt, synthetic construct
  source 1..20: mol_type = other RNA
atagagacttgaaacctagc

SEQ ID NO: 7985 - RNA, 20 nt, synthetic construct
  source 1..20: mol_type = other RNA
catagagacttgaaacctag

SEQ ID NO: 7986 - RNA, 20 nt, synthetic construct
  source 1..20: mol_type = other RNA
tagagacttaaaaccagaaa

SEQ ID NO: 7987 - RNA, 20 nt, synthetic construct
  source 1..20: mol_type = other RNA
gagacttaaaaccagaaaag

SEQ ID NO: 7988 - RNA, 20 nt, synthetic construct
  source 1..20: mol_type = other RNA
agagacttaaaaccagaaaa

SEQ ID NO: 7989 - RNA, 20 nt, synthetic construct
  source 1..20: mol_type = other RNA
atagagacttaaaaccagaa

SEQ ID NO: 7990 - RNA, 20 nt, synthetic construct
  source 1..20: mol_type = other RNA
tatagagacttaaaaccaga

SEQ ID NO: 7991 - RNA, 20 nt, synthetic construct
  source 1..20: mol_type = other RNA
agcaacattctttatgtgga

SEQ ID NO: 7992 - RNA, 20 nt, synthetic construct
  source 1..20: mol_type = other RNA
cctagcaacattctttatgt

SEQ ID NO: 7993 - RNA, 20 nt, synthetic construct
  source 1..20: mol_type = other RNA
acctagcaacattctttatg

SEQ ID NO: 7994 - RNA, 20 nt, synthetic construct
  source 1..20: mol_type = other RNA
gcaacattctttatgtggat

SEQ ID NO: 7995 - RNA, 20 nt, synthetic construct
  source 1..20: mol_type = other RNA
tagcaacattctttatgtgg

SEQ ID NO: 7996 - RNA, 20 nt, synthetic construct
  source 1..20: mol_type = other RNA
ctagcaacattctttatgtg

SEQ ID NO: 7997 - RNA, 20 nt, synthetic construct
  source 1..20: mol_type = other RNA
accagaaaagtaaggaatca

SEQ ID NO: 7998 - RNA, 20 nt, synthetic construct
  source 1..20: mol_type = other RNA
aaaagtaaggaatcatgcta

SEQ ID NO: 7999 - RNA, 20 nt, synthetic construct
  source 1..20: mol_type = other RNA
gaaaagtaaggaatcatgct

SEQ ID NO: 8000 - RNA, 20 nt, synthetic construct
  source 1..20: mol_type = other RNA
agaaaagtaaggaatcatgc

SEQ ID NO: 8001 - RNA, 20 nt, synthetic construct
  source 1..20: mol_type = other RNA
cagaaaagtaaggaatcatg

SEQ ID NO: 8002 - RNA, 20 nt, synthetic construct
  source 1..20: mol_type = other RNA
ccagaaaagtaaggaatcat

SEQ ID NO: 8003 - RNA, 20 nt, synthetic construct
  source 1..20: mol_type = other RNA
gccatgaaggtattgaagaa

SEQ ID NO: 8004 - RNA, 20 nt, synthetic construct
  source 1..20: mol_type = other RNA
tgccatgaaggtattgaaga

SEQ ID NO: 8005 - RNA, 20 nt, synthetic construct
  source 1..20: mol_type = other RNA
tgaaggtattgaagaaggcc

SEQ ID NO: 8006 - RNA, 20 nt, synthetic construct
  source 1..20: mol_type = other RNA
atgaaggtattgaagaaggc

SEQ ID NO: 8007 - RNA, 20 nt, synthetic construct
  source 1..20: mol_type = other RNA
catgaaggtattgaagaagg

SEQ ID NO: 8008 - RNA, 20 nt, synthetic construct
  source 1..20: mol_type = other RNA
ccatgaaggtattgaagaag

SEQ ID NO: 8009 - RNA, 20 nt, synthetic construct
  source 1..20: mol_type = other RNA
cacggacttcgggctgagca

SEQ ID NO: 8010 - RNA, 20 nt, synthetic construct
  source 1..20: mol_type = other RNA
acggacttcgggctgagcaa

SEQ ID NO: 8011 - RNA, 20 nt, synthetic construct
  source 1..20: mol_type = other RNA
ctcacggacttcgggctgag

SEQ ID NO: 8012 - RNA, 20 nt, synthetic construct
  source 1..20: mol_type = other RNA
tcacggacttcgggctgagc

SEQ ID NO: 8013 - RNA, 20 nt, synthetic construct
  source 1..20: mol_type = other RNA
cggacttcgggctgagcaag

SEQ ID NO: 8014 - RNA, 20 nt, synthetic construct
  source 1..20: mol_type = other RNA
tcatcgacttcgggttcgcg

SEQ ID NO: 8015 - RNA, 20 nt, synthetic construct
  source 1..20: mol_type = other RNA
catcgacttcgggttcgcgc

SEQ ID NO: 8016 - RNA, 20 nt, synthetic construct
  source 1..20: mol_type = other RNA
atcatcgacttcgggttcgc

SEQ ID NO: 8017 - RNA, 20 nt, synthetic construct
  source 1..20: mol_type = other RNA
atcgacttcgggttcgcgcg

SEQ ID NO: 8018 - RNA, 20 nt, synthetic construct
  source 1..20: mol_type = other RNA
tcgacttcgggttcgcgcgg

SEQ ID NO: 8019 - RNA, 20 nt, synthetic construct
  source 1..20: mol_type = other RNA
cgagacctgaaactggagaa

SEQ ID NO: 8020 - RNA, 20 nt, synthetic construct
  source 1..20: mol_type = other RNA
taccgagacctgaaactgga

SEQ ID NO: 8021 - RNA, 20 nt, synthetic construct
  source 1..20: mol_type = other RNA
accgagacctgaaactggag

SEQ ID NO: 8022 - RNA, 20 nt, synthetic construct
  source 1..20: mol_type = other RNA
ccgagacctgaaactggaga

SEQ ID NO: 8023 - RNA, 20 nt, synthetic construct
  source 1..20: mol_type = other RNA
gagacctgaaactggagaat

SEQ ID NO: 8024 - RNA, 20 nt, synthetic construct
  source 1..20: mol_type = other RNA
caccgcgacctcaagccgga

SEQ ID NO: 8025 - RNA, 20 nt, synthetic construct
  source 1..20: mol_type = other RNA
ccgcgacctcaagccggagg

SEQ ID NO: 8026 - RNA, 20 nt, synthetic construct
  source 1..20: mol_type = other RNA
cgcgacctcaagccggaggt

SEQ ID NO: 8027 - RNA, 20 nt, synthetic construct
  source 1..20: mol_type = other RNA
gcgacctcaagccggaggtg

SEQ ID NO: 8028 - RNA, 20 nt, synthetic construct
  source 1..20: mol_type = other RNA
accgcgacctcaagccggag

SEQ ID NO: 8029 - RNA, 20 nt, synthetic construct
  source 1..20: mol_type = other RNA
gagaatgtgctgctggactc

SEQ ID NO: 8030 - RNA, 20 nt, synthetic construct
  source 1..20: mol_type = other RNA
actggagaatgtgctgctgg

SEQ ID NO: 8031 - RNA, 20 nt, synthetic construct
  source 1..20: mol_type = other RNA
ctggagaatgtgctgctgga

SEQ ID NO: 8032 - RNA, 20 nt, synthetic construct
  source 1..20: mol_type = other RNA
tggagaatgtgctgctggac

SEQ ID NO: 8033 - RNA, 20 nt, synthetic construct
  source 1..20: mol_type = other RNA
ggagaatgtgctgctggact

SEQ ID NO: 8034 - RNA, 20 nt, synthetic construct
  source 1..20: mol_type = other RNA
agaatgtgctgctggactcc

SEQ ID NO: 8035 - RNA, 20 nt, synthetic construct
  source 1..20: mol_type = other RNA
tcgcagaacatcctgtacgc

SEQ ID NO: 8036 - RNA, 20 nt, synthetic construct
  source 1..20: mol_type = other RNA
cagaacatcctgtacgccga

SEQ ID NO: 8037 - RNA, 20 nt, synthetic construct
  source 1..20: mol_type = other RNA
ctcgcagaacatcctgtacg

SEQ ID NO: 8038 - RNA, 20 nt, synthetic construct
  source 1..20: mol_type = other RNA
cgcagaacatcctgtacgcc

SEQ ID NO: 8039 - RNA, 20 nt, synthetic construct
  source 1..20: mol_type = other RNA
gcagaacatcctgtacgccg

SEQ ID NO: 8040 - RNA, 20 nt, synthetic construct
  source 1..20: mol_type = other RNA
agaacatcctgtacgccgac

SEQ ID NO: 8041 - RNA, 20 nt, synthetic construct
  source 1..20: mol_type = other RNA
cgccatgaaggtgctgcgca

SEQ ID NO: 8042 - RNA, 20 nt, synthetic construct
  source 1..20: mol_type = other RNA
gccatgaaggtgctgcgcaa

SEQ ID NO: 8043 - RNA, 20 nt, synthetic construct
  source 1..20: mol_type = other RNA
catgaaggtgctgcgcaagg

SEQ ID NO: 8044 - RNA, 20 nt, synthetic construct
  source 1..20: mol_type = other RNA
atgaaggtgctgcgcaaggc

SEQ ID NO: 8045 - RNA, 20 nt, synthetic construct
  source 1..20: mol_type = other RNA
ccatgaaggtgctgcgcaag

SEQ ID NO: 8046 - RNA, 20 nt, synthetic construct
  source 1..20: mol_type = other RNA
tgaaggtgctgcgcaaggcg

SEQ ID NO: 8047 - RNA, 20 nt, synthetic construct
  source 1..20: mol_type = other RNA
cagtcaagatcctcagtcgc

SEQ ID NO: 8048 - RNA, 20 nt, synthetic construct
  source 1..20: mol_type = other RNA
agtcaagatcctcagtcgca

SEQ ID NO: 8049 - RNA, 20 nt, synthetic construct
  source 1..20: mol_type = other RNA
tcaagatcctcagtcgcagg

SEQ ID NO: 8050 - RNA, 20 nt, synthetic construct
  source 1..20: mol_type = other RNA
cgcagtcaagatcctcagtc

SEQ ID NO: 8051 - RNA, 20 nt, synthetic construct
  source 1..20: mol_type = other RNA
gcagtcaagatcctcagtcg

SEQ ID NO: 8052 - RNA, 20 nt, synthetic construct
  source 1..20: mol_type = other RNA
gtcaagatcctcagtcgcag

SEQ ID NO: 8053 - RNA, 20 nt, synthetic construct
  source 1..20: mol_type = other RNA
gggatctgaaacctgaggta

SEQ ID NO: 8054 - RNA, 20 nt, synthetic construct
  source 1..20: mol_type = other RNA
agggatctgaaacctgaggt

SEQ ID NO: 8055 - RNA, 20 nt, synthetic construct
  source 1..20: mol_type = other RNA
cagggatctgaaacctgagg

SEQ ID NO: 8056 - RNA, 20 nt, synthetic construct
  source 1..20: mol_type = other RNA
acagggatctgaaacctgag

SEQ ID NO: 8057 - RNA, 20 nt, synthetic construct
  source 1..20: mol_type = other RNA
gtgatattaagcttgagaat

SEQ ID NO: 8058 - RNA, 20 nt, synthetic construct
  source 1..20: mol_type = other RNA
cgtgatattaagcttgagaa

SEQ ID NO: 8059 - RNA, 20 nt, synthetic construct
  source 1..20: mol_type = other RNA
tcgtgatattaagcttgaga

SEQ ID NO: 8060 - RNA, 20 nt, synthetic construct
  source 1..20: mol_type = other RNA
atcgtgatattaagcttgag

SEQ ID NO: 8061 - RNA, 20 nt, synthetic construct
  source 1..20: mol_type = other RNA
tatcgtgatattaagcttga

SEQ ID NO: 8062 - RNA, 20 nt, synthetic construct
  source 1..20: mol_type = other RNA
cagaatttattgttcaccga

SEQ ID NO: 8063 - RNA, 20 nt, synthetic construct
  source 1..20: mol_type = other RNA
ttgcagaatttattgttcac

SEQ ID NO: 8064 - RNA, 20 nt, synthetic construct
  source 1..20: mol_type = other RNA
agaatttattgttcaccgat

SEQ ID NO: 8065 - RNA, 20 nt, synthetic construct
  source 1..20: mol_type = other RNA
gcagaatttattgttcaccg

SEQ ID NO: 8066 - RNA, 20 nt, synthetic construct
  source 1..20: mol_type = other RNA
tgcagaatttattgttcacc

SEQ ID NO: 8067 - RNA, 20 nt, synthetic construct
  source 1..20: mol_type = other RNA
cttgcagaatttattgttca

SEQ ID NO: 8068 - RNA, 20 nt, synthetic construct
  source 1..20: mol_type = other RNA
agaatattctacttgattct

SEQ ID NO: 8069 - RNA, 20 nt, synthetic construct
  source 1..20: mol_type = other RNA
gagaatattctacttgattc

SEQ ID NO: 8070 - RNA, 20 nt, synthetic construct
  source 1..20: mol_type = other RNA
tgagaatattctacttgatt

SEQ ID NO: 8071 - RNA, 20 nt, synthetic construct
  source 1..20: mol_type = other RNA
ttgagaatattctacttgat

SEQ ID NO: 8072 - RNA, 20 nt, synthetic construct
  source 1..20: mol_type = other RNA
cttgagaatattctacttga

SEQ ID NO: 8073 - RNA, 20 nt, synthetic construct
  source 1..20: mol_type = other RNA
gcttgagaatattctacttg

SEQ ID NO: 8074 - RNA, 20 nt, synthetic construct
  source 1..20: mol_type = other RNA
agtcaaaataatcagcaaaa

SEQ ID NO: 8075 - RNA, 20 nt, synthetic construct
  source 1..20: mol_type = other RNA
cagtcaaaataatcagcaaa

SEQ ID NO: 8076 - RNA, 20 nt, synthetic construct
  source 1..20: mol_type = other RNA
caaaataatcagcaaaaggt

SEQ ID NO: 8077 - RNA, 20 nt, synthetic construct
  source 1..20: mol_type = other RNA
tcaaaataatcagcaaaagg

SEQ ID NO: 8078 - RNA, 20 nt, synthetic construct
  source 1..20: mol_type = other RNA
gtcaaaataatcagcaaaag

SEQ ID NO: 8079 - RNA, 20 nt, synthetic construct
  source 1..20: mol_type = other RNA
gcagtcaaaataatcagcaa

SEQ ID NO: 8080 - RNA, 20 nt, synthetic construct
  source 1..20: mol_type = other RNA
tgcagtcaaaataatcagca

SEQ ID NO: 8081 - RNA, 20 nt, synthetic construct
  source 1..20: mol_type = other RNA
gtgatcttaaacctagtaat

SEQ ID NO: 8082 - RNA, 20 nt, synthetic construct
  source 1..20: mol_type = other RNA
cgtgatcttaaacctagtaa

SEQ ID NO: 8083 - RNA, 20 nt, synthetic construct
  source 1..20: mol_type = other RNA
tcgtgatcttaaacctagta

SEQ ID NO: 8084 - RNA, 20 nt, synthetic construct
  source 1..20: mol_type = other RNA
atcgtgatcttaaacctagt

SEQ ID NO: 8085 - RNA, 20 nt, synthetic construct
  source 1..20: mol_type = other RNA
catcgtgatcttaaacctag

SEQ ID NO: 8086 - RNA, 20 nt, synthetic construct
  source 1..20: mol_type = other RNA
tagagacctgaagccagaaa

SEQ ID NO: 8087 - RNA, 20 nt, synthetic construct
  source 1..20: mol_type = other RNA
gagacctgaagccagaaaag

SEQ ID NO: 8088 - RNA, 20 nt, synthetic construct
  source 1..20: mol_type = other RNA
agagacctgaagccagaaaa

SEQ ID NO: 8089 - RNA, 20 nt, synthetic construct
  source 1..20: mol_type = other RNA
atagagacctgaagccagaa

SEQ ID NO: 8090 - RNA, 20 nt, synthetic construct
  source 1..20: mol_type = other RNA
tatagagacctgaagccaga

SEQ ID NO: 8091 - RNA, 20 nt, synthetic construct
  source 1..20: mol_type = other RNA
aaaagtaaagctgtattctt

SEQ ID NO: 8092 - RNA, 20 nt, synthetic construct
  source 1..20: mol_type = other RNA
gaaaagtaaagctgtattct

SEQ ID NO: 8093 - RNA, 20 nt, synthetic construct
  source 1..20: mol_type = other RNA
agaaaagtaaagctgtattc

SEQ ID NO: 8094 - RNA, 20 nt, synthetic construct
  source 1..20: mol_type = other RNA
cagaaaagtaaagctgtatt

SEQ ID NO: 8095 - RNA, 20 nt, synthetic construct
  source 1..20: mol_type = other RNA
ccagaaaagtaaagctgtat

SEQ ID NO: 8096 - RNA, 20 nt, synthetic construct
  source 1..20: mol_type = other RNA
gccagaaaagtaaagctgta

SEQ ID NO: 8097 - RNA, 20 nt, synthetic construct
  source 1..20: mol_type = other RNA
cagtgaaggtattgtctctg

SEQ ID NO: 8098 - RNA, 20 nt, synthetic construct
  source 1..20: mol_type = other RNA
tgcagtgaaggtattgtctc

SEQ ID NO: 8099 - RNA, 20 nt, synthetic construct
  source 1..20: mol_type = other RNA
tgaaggtattgtctctgagc

SEQ ID NO: 8100 - RNA, 20 nt, synthetic construct
  source 1..20: mol_type = other RNA
gtgaaggtattgtctctgag

SEQ ID NO: 8101 - RNA, 20 nt, synthetic construct
  source 1..20: mol_type = other RNA
agtgaaggtattgtctctga

SEQ ID NO: 8102 - RNA, 20 nt, synthetic construct
  source 1..20: mol_type = other RNA
gcagtgaaggtattgtctct

SEQ ID NO: 8103 - RNA, 20 nt, synthetic construct
  source 1..20: mol_type = other RNA
acagactttggactatgcaa

SEQ ID NO: 8104 - RNA, 20 nt, synthetic construct
  source 1..20: mol_type = other RNA
ctaacagactttggactatg

SEQ ID NO: 8105 - RNA, 20 nt, synthetic construct
  source 1..20: mol_type = other RNA
taacagactttggactatgc

SEQ ID NO: 8106 - RNA, 20 nt, synthetic construct
  source 1..20: mol_type = other RNA
aacagactttggactatgca

SEQ ID NO: 8107 - RNA, 20 nt, synthetic construct
  source 1..20: mol_type = other RNA
cagactttggactatgcaaa

SEQ ID NO: 8108 - RNA, 20 nt, synthetic construct
  source 1..20: mol_type = other RNA
tacagagacctgaagccgga

SEQ ID NO: 8109 - RNA, 20 nt, synthetic construct
  source 1..20: mol_type = other RNA
acagagacctgaagccggag

SEQ ID NO: 8110 - RNA, 20 nt, synthetic construct
  source 1..20: mol_type = other RNA
cagagacctgaagccggaga

SEQ ID NO: 8111 - RNA, 20 nt, synthetic construct
  source 1..20: mol_type = other RNA
agagacctgaagccggagaa

SEQ ID NO: 8112 - RNA, 20 nt, synthetic construct
  source 1..20: mol_type = other RNA
gagacctgaagccggagaat

SEQ ID NO: 8113 - RNA, 20 nt, synthetic construct
  source 1..20: mol_type = other RNA
gccggagaatatcatgctta

SEQ ID NO: 8114 - RNA, 20 nt, synthetic construct
  source 1..20: mol_type = other RNA
ccggagaatatcatgcttaa

SEQ ID NO: 8115 - RNA, 20 nt, synthetic construct
  source 1..20: mol_type = other RNA
cggagaatatcatgcttaat

SEQ ID NO: 8116 - RNA, 20 nt, synthetic construct
  source 1..20: mol_type = other RNA
ggagaatatcatgcttaatc

SEQ ID NO: 8117 - RNA, 20 nt, synthetic construct
  source 1..20: mol_type = other RNA
gagaatatcatgcttaatca

SEQ ID NO: 8118 - RNA, 20 nt, synthetic construct
  source 1..20: mol_type = other RNA
agaatatcatgcttaatcac

SEQ ID NO: 8119 - RNA, 20 nt, synthetic construct
  source 1..20: mol_type = other RNA
tgccatgaaggtgcttaaaa

SEQ ID NO: 8120 - RNA, 20 nt, synthetic construct
  source 1..20: mol_type = other RNA
gaccgactttggactctgca

SEQ ID NO: 8121 - RNA, 20 nt, synthetic construct
  source 1..20: mol_type = other RNA
accgactttggactctgcaa

SEQ ID NO: 8122 - RNA, 20 nt, synthetic construct
  source 1..20: mol_type = other RNA
ctgaccgactttggactctg

SEQ ID NO: 8123 - RNA, 20 nt, synthetic construct
  source 1..20: mol_type = other RNA
tgaccgactttggactctgc

SEQ ID NO: 8124 - RNA, 20 nt, synthetic construct
  source 1..20: mol_type = other RNA
ccgactttggactctgcaag

SEQ ID NO: 8125 - RNA, 20 nt, synthetic construct
  source 1..20: mol_type = other RNA
taccgggacctcaagcccga

SEQ ID NO: 8126 - RNA, 20 nt, synthetic construct
  source 1..20: mol_type = other RNA
accgggacctcaagcccgag

SEQ ID NO: 8127 - RNA, 20 nt, synthetic construct
  source 1..20: mol_type = other RNA
ccgggacctcaagcccgaga

SEQ ID NO: 8128 - RNA, 20 nt, synthetic construct
  source 1..20: mol_type = other RNA
cgggacctcaagcccgagaa

SEQ ID NO: 8129 - RNA, 20 nt, synthetic construct
  source 1..20: mol_type = other RNA
gggacctcaagcccgagaac

SEQ ID NO: 8130 - RNA, 20 nt, synthetic construct
  source 1..20: mol_type = other RNA
ccgagaacatcatgctcagc

SEQ ID NO: 8131 - RNA, 20 nt, synthetic construct
  source 1..20: mol_type = other RNA
gcccgagaacatcatgctca

SEQ ID NO: 8132 - RNA, 20 nt, synthetic construct
  source 1..20: mol_type = other RNA
cccgagaacatcatgctcag

SEQ ID NO: 8133 - RNA, 20 nt, synthetic construct
  source 1..20: mol_type = other RNA
cgagaacatcatgctcagca

SEQ ID NO: 8134 - RNA, 20 nt, synthetic construct
  source 1..20: mol_type = other RNA
gagaacatcatgctcagcag

SEQ ID NO: 8135 - RNA, 20 nt, synthetic construct
  source 1..20: mol_type = other RNA
agaacatcatgctcagcagc

SEQ ID NO: 8136 - RNA, 20 nt, synthetic construct
  source 1..20: mol_type = other RNA
tgccatgaaagtcctaagga

SEQ ID NO: 8137 - RNA, 20 nt, synthetic construct
  source 1..20: mol_type = other RNA
gccatgaaagtcctaaggaa

SEQ ID NO: 8138 - RNA, 20 nt, synthetic construct
  source 1..20: mol_type = other RNA
catgaaagtcctaaggaagg

SEQ ID NO: 8139 - RNA, 20 nt, synthetic construct
  source 1..20: mol_type = other RNA
tgaaagtcctaaggaaggtg

SEQ ID NO: 8140 - RNA, 20 nt, synthetic construct
  source 1..20: mol_type = other RNA
ccatgaaagtcctaaggaag

SEQ ID NO: 8141 - RNA, 20 nt, synthetic construct
  source 1..20: mol_type = other RNA
atgaaagtcctaaggaaggt

SEQ ID NO: 8142 - RNA, 20 nt, synthetic construct
  source 1..20: mol_type = other RNA
gaaagtcctaaggaaggtga

SEQ ID NO: 8143 - RNA, 20 nt, synthetic construct
  source 1..20: mol_type = other RNA
tgccgcgatttgaacccaaa

SEQ ID NO: 8144 - RNA, 20 nt, synthetic construct
  source 1..20: mol_type = other RNA
gccgcgatttgaacccaaac

SEQ ID NO: 8145 - RNA, 20 nt, synthetic construct
  source 1..20: mol_type = other RNA
ccgcgatttgaacccaaaca

SEQ ID NO: 8146 - RNA, 20 nt, synthetic construct
  source 1..20: mol_type = other RNA
cgcgatttgaacccaaacaa

SEQ ID NO: 8147 - RNA, 20 nt, synthetic construct
  source 1..20: mol_type = other RNA
gcgatttgaacccaaacaac

SEQ ID NO: 8148 - RNA, 20 nt, synthetic construct
  source 1..20: mol_type = other RNA
ccaaacaacatcttattgaa

SEQ ID NO: 8149 - RNA, 20 nt, synthetic construct
  source 1..20: mol_type = other RNA
acaacatcttattgaatgat

SEQ ID NO: 8150 - RNA, 20 nt, synthetic construct
  source 1..20: mol_type = other RNA
cccaaacaacatcttattga

SEQ ID NO: 8151 - RNA, 20 nt, synthetic construct
  source 1..20: mol_type = other RNA
caaacaacatcttattgaat

SEQ ID NO: 8152 - RNA, 20 nt, synthetic construct
  source 1..20: mol_type = other RNA
aaacaacatcttattgaatg

SEQ ID NO: 8153 - RNA, 20 nt, synthetic construct
  source 1..20: mol_type = other RNA
aacaacatcttattgaatga

SEQ ID NO: 8154 - RNA, 20 nt, synthetic construct
  source 1..20: mol_type = other RNA
taaaagtaagtaaaatttgt

SEQ ID NO: 8155 - RNA, 20 nt, synthetic construct
  source 1..20: mol_type = other RNA
tttaaaagtaagtaaaattt

SEQ ID NO: 8156 - RNA, 20 nt, synthetic construct
  source 1..20: mol_type = other RNA
ttaaaagtaagtaaaatttg

SEQ ID NO: 8157 - RNA, 20 nt, synthetic construct
  source 1..20: mol_type = other RNA
aaaagtaagtaaaatttgta

SEQ ID NO: 8158 - RNA, 20 nt, synthetic construct
  source 1..20: mol_type = other RNA
gggacctccaccccgggaac

SEQ ID NO: 8159 - RNA, 20 nt, synthetic construct
  source 1..20: mol_type = other RNA
cgggacctccaccccgggaa

SEQ ID NO: 8160 - RNA, 20 nt, synthetic construct
  source 1..20: mol_type = other RNA
ccgggacctccaccccggga

SEQ ID NO: 8161 - RNA, 20 nt, synthetic construct
  source 1..20: mol_type = other RNA
gccgggacctccaccccggg

SEQ ID NO: 8162 - RNA, 20 nt, synthetic construct
  source 1..20: mol_type = other RNA
tgccgggacctccaccccgg

SEQ ID NO: 8163 - RNA, 20 nt, synthetic construct
  source 1..20: mol_type = other RNA
gggaacctgctcctggacca

SEQ ID NO: 8164 - RNA, 20 nt, synthetic construct
  source 1..20: mol_type = other RNA
cgggaacctgctcctggacc

SEQ ID NO: 8165 - RNA, 20 nt, synthetic construct
  source 1..20: mol_type = other RNA
ggaacctgctcctggaccag

SEQ ID NO: 8166 - RNA, 20 nt, synthetic construct
  source 1..20: mol_type = other RNA
ccgggaacctgctcctggac

SEQ ID NO: 8167 - RNA, 20 nt, synthetic construct
  source 1..20: mol_type = other RNA
cccgggaacctgctcctgga

SEQ ID NO: 8168 - RNA, 20 nt, synthetic construct
  source 1..20: mol_type = other RNA
ccccgggaacctgctcctgg

SEQ ID NO: 8169 - RNA, 20 nt, synthetic construct
  source 1..20: mol_type = other RNA
ggtgaaggcaggtgccaccc

SEQ ID NO: 8170 - RNA, 20 nt, synthetic construct
  source 1..20: mol_type = other RNA
tgaaggcaggtgccaccctg

SEQ ID NO: 8171 - RNA, 20 nt, synthetic construct
  source 1..20: mol_type = other RNA
gtgaaggcaggtgccaccct

SEQ ID NO: 8172 - RNA, 20 nt, synthetic construct
  source 1..20: mol_type = other RNA
tggtgaaggcaggtgccacc

SEQ ID NO: 8173 - RNA, 20 nt, synthetic construct
  source 1..20: mol_type = other RNA
gtggtgaaggcaggtgccac

SEQ ID NO: 8174 - RNA, 20 nt, synthetic construct
  source 1..20: mol_type = other RNA
tgtggtgaaggcaggtgcca

SEQ ID NO: 8175 - RNA, 20 nt, synthetic construct
  source 1..20: mol_type = other RNA
tgacagactttggtctgtcc

SEQ ID NO: 8176 - RNA, 20 nt, synthetic construct
  source 1..20: mol_type = other RNA
cagactttggtctgtcccgc

SEQ ID NO: 8177 - RNA, 20 nt, synthetic construct
  source 1..20: mol_type = other RNA
acagactttggtctgtcccg

SEQ ID NO: 8178 - RNA, 20 nt, synthetic construct
  source 1..20: mol_type = other RNA
gacagactttggtctgtccc

SEQ ID NO: 8179 - RNA, 20 nt, synthetic construct
  source 1..20: mol_type = other RNA
ctgacagactttggtctgtc

SEQ ID NO: 8180 - RNA, 20 nt, synthetic construct
  source 1..20: mol_type = other RNA
gagatgtgaaggtagagtta

SEQ ID NO: 8181 - RNA, 20 nt, synthetic construct
  source 1..20: mol_type = other RNA
cgagatgtgaaggtagagtt

SEQ ID NO: 8182 - RNA, 20 nt, synthetic construct
  source 1..20: mol_type = other RNA
tcgagatgtgaaggtagagt

SEQ ID NO: 8183 - RNA, 20 nt, synthetic construct
  source 1..20: mol_type = other RNA
atcgagatgtgaaggtagag

SEQ ID NO: 8184 - RNA, 20 nt, synthetic construct
  source 1..20: mol_type = other RNA
catcgagatgtgaaggtaga

SEQ ID NO: 8185 - RNA, 20 nt, synthetic construct
  source 1..20: mol_type = other RNA
agaatattcttctagatgaa

SEQ ID NO: 8186 - RNA, 20 nt, synthetic construct
  source 1..20: mol_type = other RNA
atggagaatattcttctaga

SEQ ID NO: 8187 - RNA, 20 nt, synthetic construct
  source 1..20: mol_type = other RNA
gagaatattcttctagatga

SEQ ID NO: 8188 - RNA, 20 nt, synthetic construct
  source 1..20: mol_type = other RNA
ggagaatattcttctagatg

SEQ ID NO: 8189 - RNA, 20 nt, synthetic construct
  source 1..20: mol_type = other RNA
tggagaatattcttctagat

SEQ ID NO: 8190 - RNA, 20 nt, synthetic construct
  source 1..20: mol_type = other RNA
gatggagaatattcttctag

SEQ ID NO: 8191 - RNA, 20 nt, synthetic construct
  source 1..20: mol_type = other RNA
tgcagtgaaggtaggggcgt

SEQ ID NO: 8192 - RNA, 20 nt, synthetic construct
  source 1..20: mol_type = other RNA
tgaaggtaggggcgtagata

SEQ ID NO: 8193 - RNA, 20 nt, synthetic construct
  source 1..20: mol_type = other RNA
gtgaaggtaggggcgtagat

SEQ ID NO: 8194 - RNA, 20 nt, synthetic construct
  source 1..20: mol_type = other RNA
agtgaaggtaggggcgtaga

SEQ ID NO: 8195 - RNA, 20 nt, synthetic construct
  source 1..20: mol_type = other RNA
cagtgaaggtaggggcgtag

SEQ ID NO: 8196 - RNA, 20 nt, synthetic construct
  source 1..20: mol_type = other RNA
gcagtgaaggtaggggcgta

SEQ ID NO: 8197 - RNA, 20 nt, synthetic construct
  source 1..20: mol_type = other RNA
acagacaatgccctctccag

SEQ ID NO: 8198 - RNA, 20 nt, synthetic construct
  source 1..20: mol_type = other RNA
tcacagacaatgccctctcc

SEQ ID NO: 8199 - RNA, 20 nt, synthetic construct
  source 1..20: mol_type = other RNA
cagacaatgccctctccaga

SEQ ID NO: 8200 - RNA, 20 nt, synthetic construct
  source 1..20: mol_type = other RNA
cacagacaatgccctctcca

SEQ ID NO: 8201 - RNA, 20 nt, synthetic construct
  source 1..20: mol_type = other RNA
atcacagacaatgccctctc

SEQ ID NO: 8202 - RNA, 20 nt, synthetic construct
  source 1..20: mol_type = other RNA
aagacctggctgccaggaac

SEQ ID NO: 8203 - RNA, 20 nt, synthetic construct
  source 1..20: mol_type = other RNA
aaagacctggctgccaggaa

SEQ ID NO: 8204 - RNA, 20 nt, synthetic construct
  source 1..20: mol_type = other RNA
caaagacctggctgccagga

SEQ ID NO: 8205 - RNA, 20 nt, synthetic construct
  source 1..20: mol_type = other RNA
acaaagacctggctgccagg

SEQ ID NO: 8206 - RNA, 20 nt, synthetic construct
  source 1..20: mol_type = other RNA
cacaaagacctggctgccag

SEQ ID NO: 8207 - RNA, 20 nt, synthetic construct
  source 1..20: mol_type = other RNA
ggaactgtgtgtaggtgcca

SEQ ID NO: 8208 - RNA, 20 nt, synthetic construct
  source 1..20: mol_type = other RNA
tgccaggaactgtgtgtagg

SEQ ID NO: 8209 - RNA, 20 nt, synthetic construct
  source 1..20: mol_type = other RNA
aggaactgtgtgtaggtgcc

SEQ ID NO: 8210 - RNA, 20 nt, synthetic construct
  source 1..20: mol_type = other RNA
caggaactgtgtgtaggtgc

SEQ ID NO: 8211 - RNA, 20 nt, synthetic construct
  source 1..20: mol_type = other RNA
ccaggaactgtgtgtaggtg

SEQ ID NO: 8212 - RNA, 20 nt, synthetic construct
  source 1..20: mol_type = other RNA
gccaggaactgtgtgtaggt

SEQ ID NO: 8213 - RNA, 20 nt, synthetic construct
  source 1..20: mol_type = other RNA
tgtcaaaacagttaaaggta

SEQ ID NO: 8214 - RNA, 20 nt, synthetic construct
  source 1..20: mol_type = other RNA
ttgtcaaaacagttaaaggt

SEQ ID NO: 8215 - RNA, 20 nt, synthetic construct
  source 1..20: mol_type = other RNA
caaaacagttaaaggtagga

SEQ ID NO: 8216 - RNA, 20 nt, synthetic construct
  source 1..20: mol_type = other RNA
tcaaaacagttaaaggtagg

SEQ ID NO: 8217 - RNA, 20 nt, synthetic construct
  source 1..20: mol_type = other RNA
gtcaaaacagttaaaggtag

SEQ ID NO: 8218 - RNA, 20 nt, synthetic construct
  source 1..20: mol_type = other RNA
tttgtcaaaacagttaaagg

SEQ ID NO: 8219 - RNA, 20 nt, synthetic construct
  source 1..20: mol_type = other RNA
atttgtcaaaacagttaaag

SEQ ID NO: 8220 - RNA, 20 nt, synthetic construct
  source 1..20: mol_type = other RNA
tggccgacttcggcatgacg

SEQ ID NO: 8221 - RNA, 20 nt, synthetic construct
  source 1..20: mol_type = other RNA
ccgacttcggcatgacgcgc

SEQ ID NO: 8222 - RNA, 20 nt, synthetic construct
  source 1..20: mol_type = other RNA
ctggccgacttcggcatgac

SEQ ID NO: 8223 - RNA, 20 nt, synthetic construct
  source 1..20: mol_type = other RNA
ggccgacttcggcatgacgc

SEQ ID NO: 8224 - RNA, 20 nt, synthetic construct
  source 1..20: mol_type = other RNA
gccgacttcggcatgacgcg

SEQ ID NO: 8225 - RNA, 20 nt, synthetic construct
  source 1..20: mol_type = other RNA
cgcgacatcaagcccgagaa

SEQ ID NO: 8226 - RNA, 20 nt, synthetic construct
  source 1..20: mol_type = other RNA
caccgcgacatcaagcccga

SEQ ID NO: 8227 - RNA, 20 nt, synthetic construct
  source 1..20: mol_type = other RNA
accgcgacatcaagcccgag

SEQ ID NO: 8228 - RNA, 20 nt, synthetic construct
  source 1..20: mol_type = other RNA
ccgcgacatcaagcccgaga

SEQ ID NO: 8229 - RNA, 20 nt, synthetic construct
  source 1..20: mol_type = other RNA
gcgacatcaagcccgagaac

SEQ ID NO: 8230 - RNA, 20 nt, synthetic construct
  source 1..20: mol_type = other RNA
cccgagaacgtgctgctgtt

SEQ ID NO: 8231 - RNA, 20 nt, synthetic construct
  source 1..20: mol_type = other RNA
agaacgtgctgctgttcgac

SEQ ID NO: 8232 - RNA, 20 nt, synthetic construct
  source 1..20: mol_type = other RNA
gcccgagaacgtgctgctgt

SEQ ID NO: 8233 - RNA, 20 nt, synthetic construct
  source 1..20: mol_type = other RNA
ccgagaacgtgctgctgttc

SEQ ID NO: 8234 - RNA, 20 nt, synthetic construct
  source 1..20: mol_type = other RNA
cgagaacgtgctgctgttcg

SEQ ID NO: 8235 - RNA, 20 nt, synthetic construct
  source 1..20: mol_type = other RNA
gagaacgtgctgctgttcga

SEQ ID NO: 8236 - RNA, 20 nt, synthetic construct
  source 1..20: mol_type = other RNA
ggcactgaagtttgtgaaca

SEQ ID NO: 8237 - RNA, 20 nt, synthetic construct
  source 1..20: mol_type = other RNA
cactgaagtttgtgaacaag

SEQ ID NO: 8238 - RNA, 20 nt, synthetic construct
  source 1..20: mol_type = other RNA
gcactgaagtttgtgaacaa

SEQ ID NO: 8239 - RNA, 20 nt, synthetic construct
  source 1..20: mol_type = other RNA
actgaagtttgtgaacaaga

SEQ ID NO: 8240 - RNA, 20 nt, synthetic construct
  source 1..20: mol_type = other RNA
ctgaagtttgtgaacaagag

SEQ ID NO: 8241 - RNA, 20 nt, synthetic construct
  source 1..20: mol_type = other RNA
tgaagtttgtgaacaagagc

SEQ ID NO: 8242 - RNA, 20 nt, synthetic construct
  source 1..20: mol_type = other RNA
gaccgacttcggccacacga

SEQ ID NO: 8243 - RNA, 20 nt, synthetic construct
  source 1..20: mol_type = other RNA
tgaccgacttcggccacacg

SEQ ID NO: 8244 - RNA, 20 nt, synthetic construct
  source 1..20: mol_type = other RNA
ccgacttcggccacacgagg

SEQ ID NO: 8245 - RNA, 20 nt, synthetic construct
  source 1..20: mol_type = other RNA
accgacttcggccacacgag

SEQ ID NO: 8246 - RNA, 20 nt, synthetic construct
  source 1..20: mol_type = other RNA
ctgaccgacttcggccacac

SEQ ID NO: 8247 - RNA, 20 nt, synthetic construct
  source 1..20: mol_type = other RNA
cgggacctgaagccggagaa

SEQ ID NO: 8248 - RNA, 20 nt, synthetic construct
  source 1..20: mol_type = other RNA
gggacctgaagccggagaac

SEQ ID NO: 8249 - RNA, 20 nt, synthetic construct
  source 1..20: mol_type = other RNA
ccgggacctgaagccggaga

SEQ ID NO: 8250 - RNA, 20 nt, synthetic construct
  source 1..20: mol_type = other RNA
accgggacctgaagccggag

SEQ ID NO: 8251 - RNA, 20 nt, synthetic construct
  source 1..20: mol_type = other RNA
taccgggacctgaagccgga

SEQ ID NO: 8252 - RNA, 20 nt, synthetic construct
  source 1..20: mol_type = other RNA
ccggagaacgtcctggtgtg

SEQ ID NO: 8253 - RNA, 20 nt, synthetic construct
  source 1..20: mol_type = other RNA
agaacgtcctggtgtgcgac

SEQ ID NO: 8254 - RNA, 20 nt, synthetic construct
  source 1..20: mol_type = other RNA
gagaacgtcctggtgtgcga

SEQ ID NO: 8255 - RNA, 20 nt, synthetic construct
  source 1..20: mol_type = other RNA
ggagaacgtcctggtgtgcg

SEQ ID NO: 8256 - RNA, 20 nt, synthetic construct
  source 1..20: mol_type = other RNA
cggagaacgtcctggtgtgc

SEQ ID NO: 8257 - RNA, 20 nt, synthetic construct
  source 1..20: mol_type = other RNA
gccggagaacgtcctggtgt

SEQ ID NO: 8258 - RNA, 20 nt, synthetic construct
  source 1..20: mol_type = other RNA
tgaagcagctcccgaaaccc

SEQ ID NO: 8259 - RNA, 20 nt, synthetic construct
  source 1..20: mol_type = other RNA
ctgaagcagctcccgaaacc

SEQ ID NO: 8260 - RNA, 20 nt, synthetic construct
  source 1..20: mol_type = other RNA
actgaagcagctcccgaaac

SEQ ID NO: 8261 - RNA, 20 nt, synthetic construct
  source 1..20: mol_type = other RNA
cactgaagcagctcccgaaa

SEQ ID NO: 8262 - RNA, 20 nt, synthetic construct
  source 1..20: mol_type = other RNA
gcactgaagcagctcccgaa

SEQ ID NO: 8263 - RNA, 20 nt, synthetic construct
  source 1..20: mol_type = other RNA
ggcactgaagcagctcccga

SEQ ID NO: 8264 - RNA, 20 nt, synthetic construct
  source 1..20: mol_type = other RNA
gggagacctgggtctgaccc

SEQ ID NO: 8265 - RNA, 20 nt, synthetic construct
  source 1..20: mol_type = other RNA
tgggagacctgggtctgacc

SEQ ID NO: 8266 - RNA, 20 nt, synthetic construct
  source 1..20: mol_type = other RNA
gagacctgggtctgacccgg

SEQ ID NO: 8267 - RNA, 20 nt, synthetic construct
  source 1..20: mol_type = other RNA
ggagacctgggtctgacccg

SEQ ID NO: 8268 - RNA, 20 nt, synthetic construct
  source 1..20: mol_type = other RNA
ctgggagacctgggtctgac

SEQ ID NO: 8269 - RNA, 20 nt, synthetic construct
  source 1..20: mol_type = other RNA
gcagatgtcaaacctgacaa

SEQ ID NO: 8270 - RNA, 20 nt, synthetic construct
  source 1..20: mol_type = other RNA
cagatgtcaaacctgacaac

SEQ ID NO: 8271 - RNA, 20 nt, synthetic construct
  source 1..20: mol_type = other RNA
cgcagatgtcaaacctgaca

SEQ ID NO: 8272 - RNA, 20 nt, synthetic construct
  source 1..20: mol_type = other RNA
acgcagatgtcaaacctgac

SEQ ID NO: 8273 - RNA, 20 nt, synthetic construct
  source 1..20: mol_type = other RNA
cacgcagatgtcaaacctga

SEQ ID NO: 8274 - RNA, 20 nt, synthetic construct
  source 1..20: mol_type = other RNA
cctgacaacgtgctggtctt

SEQ ID NO: 8275 - RNA, 20 nt, synthetic construct
  source 1..20: mol_type = other RNA
acaacgtgctggtcttcgac

SEQ ID NO: 8276 - RNA, 20 nt, synthetic construct
  source 1..20: mol_type = other RNA
gacaacgtgctggtcttcga

SEQ ID NO: 8277 - RNA, 20 nt, synthetic construct
  source 1..20: mol_type = other RNA
tgacaacgtgctggtcttcg

SEQ ID NO: 8278 - RNA, 20 nt, synthetic construct
  source 1..20: mol_type = other RNA
ctgacaacgtgctggtcttc

SEQ ID NO: 8279 - RNA, 20 nt, synthetic construct
  source 1..20: mol_type = other RNA
acctgacaacgtgctggtct

SEQ ID NO: 8280 - RNA, 20 nt, synthetic construct
  source 1..20: mol_type = other RNA
gctctgaagctcctgcgtcg

SEQ ID NO: 8281 - RNA, 20 nt, synthetic construct
  source 1..20: mol_type = other RNA
ggctctgaagctcctgcgtc

SEQ ID NO: 8282 - RNA, 20 nt, synthetic construct
  source 1..20: mol_type = other RNA
tgaagctcctgcgtcgggat

SEQ ID NO: 8283 - RNA, 20 nt, synthetic construct
  source 1..20: mol_type = other RNA
ctgaagctcctgcgtcggga

SEQ ID NO: 8284 - RNA, 20 nt, synthetic construct
  source 1..20: mol_type = other RNA
tctgaagctcctgcgtcggg

SEQ ID NO: 8285 - RNA, 20 nt, synthetic construct
  source 1..20: mol_type = other RNA
ctctgaagctcctgcgtcgg

SEQ ID NO: 8286 - RNA, 20 nt, synthetic construct
  source 1..20: mol_type = other RNA
accatcgactacgggccctt

SEQ ID NO: 8287 - RNA, 20 nt, synthetic construct
  source 1..20: mol_type = other RNA
ccatcgactacgggcccttt

SEQ ID NO: 8288 - RNA, 20 nt, synthetic construct
  source 1..20: mol_type = other RNA
catcgactacgggccctttg

SEQ ID NO: 8289 - RNA, 20 nt, synthetic construct
  source 1..20: mol_type = other RNA
atcgactacgggccctttgg

SEQ ID NO: 8290 - RNA, 20 nt, synthetic construct
  source 1..20: mol_type = other RNA
tcgactacgggccctttggc

SEQ ID NO: 8291 - RNA, 20 nt, synthetic construct
  source 1..20: mol_type = other RNA
caccgacaacatgagcatcc

SEQ ID NO: 8292 - RNA, 20 nt, synthetic construct
  source 1..20: mol_type = other RNA
accgacaacatgagcatcct

SEQ ID NO: 8293 - RNA, 20 nt, synthetic construct
  source 1..20: mol_type = other RNA
ccgacaacatgagcatcctg

SEQ ID NO: 8294 - RNA, 20 nt, synthetic construct
  source 1..20: mol_type = other RNA
cgacaacatgagcatcctgg

SEQ ID NO: 8295 - RNA, 20 nt, synthetic construct
  source 1..20: mol_type = other RNA
gacaacatgagcatcctggg

SEQ ID NO: 8296 - RNA, 20 nt, synthetic construct
  source 1..20: mol_type = other RNA
acaacatgagcatcctgggg

SEQ ID NO: 8297 - RNA, 20 nt, synthetic construct
  source 1..20: mol_type = other RNA
gctcaagggcgccgggccca

SEQ ID NO: 8298 - RNA, 20 nt, synthetic construct
  source 1..20: mol_type = other RNA
gcagctcaagggcgccgggc

SEQ ID NO: 8299 - RNA, 20 nt, synthetic construct
  source 1..20: mol_type = other RNA
cagctcaagggcgccgggcc

SEQ ID NO: 8300 - RNA, 20 nt, synthetic construct
  source 1..20: mol_type = other RNA
agctcaagggcgccgggccc

SEQ ID NO: 8301 - RNA, 20 nt, synthetic construct
  source 1..20: mol_type = other RNA
ctcaagggcgccgggcccac

SEQ ID NO: 8302 - RNA, 20 nt, synthetic construct
  source 1..20: mol_type = other RNA
tcaagggcgccgggcccacg

SEQ ID NO: 8303 - RNA, 20 nt, synthetic construct
  source 1..20: mol_type = other RNA
actgacttcggactctgcaa

SEQ ID NO: 8304 - RNA, 20 nt, synthetic construct
  source 1..20: mol_type = other RNA
tactgacttcggactctgca

SEQ ID NO: 8305 - RNA, 20 nt, synthetic construct
  source 1..20: mol_type = other RNA
ctgacttcggactctgcaag

SEQ ID NO: 8306 - RNA, 20 nt, synthetic construct
  source 1..20: mol_type = other RNA
ttactgacttcggactctgc

SEQ ID NO: 8307 - RNA, 20 nt, synthetic construct
  source 1..20: mol_type = other RNA
cttactgacttcggactctg

SEQ ID NO: 8308 - RNA, 20 nt, synthetic construct
  source 1..20: mol_type = other RNA
tacagagacttaaaaccaga

SEQ ID NO: 8309 - RNA, 20 nt, synthetic construct
  source 1..20: mol_type = other RNA
gagacttaaaaccagagaat

SEQ ID NO: 8310 - RNA, 20 nt, synthetic construct
  source 1..20: mol_type = other RNA
agagacttaaaaccagagaa

SEQ ID NO: 8311 - RNA, 20 nt, synthetic construct
  source 1..20: mol_type = other RNA
cagagacttaaaaccagaga

SEQ ID NO: 8312 - RNA, 20 nt, synthetic construct
  source 1..20: mol_type = other RNA
acagagacttaaaaccagag

SEQ ID NO: 8313 - RNA, 20 nt, synthetic construct
  source 1..20: mol_type = other RNA
tgcagggatctgaaaccaga

SEQ ID NO: 8314 - RNA, 20 nt, synthetic construct
  source 1..20: mol_type = other RNA
gcagggatctgaaaccagag

SEQ ID NO: 8315 - RNA, 20 nt, synthetic construct
  source 1..20: mol_type = other RNA
cagggatctgaaaccagaga

SEQ ID NO: 8316 - RNA, 20 nt, synthetic construct
  source 1..20: mol_type = other RNA
agggatctgaaaccagagaa

SEQ ID NO: 8317 - RNA, 20 nt, synthetic construct
  source 1..20: mol_type = other RNA
gggatctgaaaccagagaac

SEQ ID NO: 8318 - RNA, 20 nt, synthetic construct
  source 1..20: mol_type = other RNA
cagagaacattctcttggac

SEQ ID NO: 8319 - RNA, 20 nt, synthetic construct
  source 1..20: mol_type = other RNA
accagagaacattctcttgg

SEQ ID NO: 8320 - RNA, 20 nt, synthetic construct
  source 1..20: mol_type = other RNA
ccagagaacattctcttgga

SEQ ID NO: 8321 - RNA, 20 nt, synthetic construct
  source 1..20: mol_type = other RNA
agagaacattctcttggact

SEQ ID NO: 8322 - RNA, 20 nt, synthetic construct
  source 1..20: mol_type = other RNA
gagaacattctcttggactg

SEQ ID NO: 8323 - RNA, 20 nt, synthetic construct
  source 1..20: mol_type = other RNA
agaacattctcttggactgc

SEQ ID NO: 8324 - RNA, 20 nt, synthetic construct
  source 1..20: mol_type = other RNA
agtgaaggtactacagaaaa

SEQ ID NO: 8325 - RNA, 20 nt, synthetic construct
  source 1..20: mol_type = other RNA
tgcagtgaaggtactacaga

SEQ ID NO: 8326 - RNA, 20 nt, synthetic construct
  source 1..20: mol_type = other RNA
gcagtgaaggtactacagaa

SEQ ID NO: 8327 - RNA, 20 nt, synthetic construct
  source 1..20: mol_type = other RNA
cagtgaaggtactacagaaa

SEQ ID NO: 8328 - RNA, 20 nt, synthetic construct
  source 1..20: mol_type = other RNA
gatagagacttgaaaccaga

SEQ ID NO: 8329 - RNA, 20 nt, synthetic construct
  source 1..20: mol_type = other RNA
atagagacttgaaaccagaa

SEQ ID NO: 8330 - RNA, 20 nt, synthetic construct
  source 1..20: mol_type = other RNA
tagagacttgaaaccagaaa

SEQ ID NO: 8331 - RNA, 20 nt, synthetic construct
  source 1..20: mol_type = other RNA
gagacttgaaaccagaaaat

SEQ ID NO: 8332 - RNA, 20 nt, synthetic construct
  source 1..20: mol_type = other RNA
tgctgtcaaagtgttacaga

SEQ ID NO: 8333 - RNA, 20 nt, synthetic construct
  source 1..20: mol_type = other RNA
gctgtcaaagtgttacagaa

SEQ ID NO: 8334 - RNA, 20 nt, synthetic construct
  source 1..20: mol_type = other RNA
ctgtcaaagtgttacagaaa

SEQ ID NO: 8335 - RNA, 20 nt, synthetic construct
  source 1..20: mol_type = other RNA
tgtcaaagtgttacagaaaa

SEQ ID NO: 8336 - RNA, 20 nt, synthetic construct
  source 1..20: mol_type = other RNA
gggacctcaagaccgagaac

SEQ ID NO: 8337 - RNA, 20 nt, synthetic construct
  source 1..20: mol_type = other RNA
cgggacctcaagaccgagaa

SEQ ID NO: 8338 - RNA, 20 nt, synthetic construct
  source 1..20: mol_type = other RNA
ccgggacctcaagaccgaga

SEQ ID NO: 8339 - RNA, 20 nt, synthetic construct
  source 1..20: mol_type = other RNA
accgggacctcaagaccgag

SEQ ID NO: 8340 - RNA, 20 nt, synthetic construct
  source 1..20: mol_type = other RNA
caccgggacctcaagaccga

SEQ ID NO: 8341 - RNA, 20 nt, synthetic construct
  source 1..20: mol_type = other RNA
ccgagaacctcctgctggat

SEQ ID NO: 8342 - RNA, 20 nt, synthetic construct
  source 1..20: mol_type = other RNA
accgagaacctcctgctgga

SEQ ID NO: 8343 - RNA, 20 nt, synthetic construct
  source 1..20: mol_type = other RNA
agaacctcctgctggatggc

SEQ ID NO: 8344 - RNA, 20 nt, synthetic construct
  source 1..20: mol_type = other RNA
gagaacctcctgctggatgg

SEQ ID NO: 8345 - RNA, 20 nt, synthetic construct
  source 1..20: mol_type = other RNA
cgagaacctcctgctggatg

SEQ ID NO: 8346 - RNA, 20 nt, synthetic construct
  source 1..20: mol_type = other RNA
gaccgagaacctcctgctgg

SEQ ID NO: 8347 - RNA, 20 nt, synthetic construct
  source 1..20: mol_type = other RNA
caccgtgacctcaaagctga

SEQ ID NO: 8348 - RNA, 20 nt, synthetic construct
  source 1..20: mol_type = other RNA
accgtgacctcaaagctgaa

SEQ ID NO: 8349 - RNA, 20 nt, synthetic construct
  source 1..20: mol_type = other RNA
ccgtgacctcaaagctgaaa

SEQ ID NO: 8350 - RNA, 20 nt, synthetic construct
  source 1..20: mol_type = other RNA
cgtgacctcaaagctgaaaa

SEQ ID NO: 8351 - RNA, 20 nt, synthetic construct
  source 1..20: mol_type = other RNA
gtgacctcaaagctgaaaat

SEQ ID NO: 8352 - RNA, 20 nt, synthetic construct
  source 1..20: mol_type = other RNA
agctgaaaatctcctgctgg

SEQ ID NO: 8353 - RNA, 20 nt, synthetic construct
  source 1..20: mol_type = other RNA
gctgaaaatctcctgctgga

SEQ ID NO: 8354 - RNA, 20 nt, synthetic construct
  source 1..20: mol_type = other RNA
ctgaaaatctcctgctggat

SEQ ID NO: 8355 - RNA, 20 nt, synthetic construct
  source 1..20: mol_type = other RNA
tgaaaatctcctgctggata

SEQ ID NO: 8356 - RNA, 20 nt, synthetic construct
  source 1..20: mol_type = other RNA
gaaaatctcctgctggataa

SEQ ID NO: 8357 - RNA, 20 nt, synthetic construct
  source 1..20: mol_type = other RNA
aaaatctcctgctggataac

SEQ ID NO: 8358 - RNA, 20 nt, synthetic construct
  source 1..20: mol_type = other RNA
gtgatttaaaagctgaaaat

SEQ ID NO: 8359 - RNA, 20 nt, synthetic construct
  source 1..20: mol_type = other RNA
cgtgatttaaaagctgaaaa

SEQ ID NO: 8360 - RNA, 20 nt, synthetic construct
  source 1..20: mol_type = other RNA
tcgtgatttaaaagctgaaa

SEQ ID NO: 8361 - RNA, 20 nt, synthetic construct
  source 1..20: mol_type = other RNA
atcgtgatttaaaagctgaa

SEQ ID NO: 8362 - RNA, 20 nt, synthetic construct
  source 1..20: mol_type = other RNA
catcgtgatttaaaagctga

SEQ ID NO: 8363 - RNA, 20 nt, synthetic construct
  source 1..20: mol_type = other RNA
gctgaaaatttacttctgga

SEQ ID NO: 8364 - RNA, 20 nt, synthetic construct
  source 1..20: mol_type = other RNA
aaaatttacttctggatgcc

SEQ ID NO: 8365 - RNA, 20 nt, synthetic construct
  source 1..20: mol_type = other RNA
gaaaatttacttctggatgc

SEQ ID NO: 8366 - RNA, 20 nt, synthetic construct
  source 1..20: mol_type = other RNA
tgaaaatttacttctggatg

SEQ ID NO: 8367 - RNA, 20 nt, synthetic construct
  source 1..20: mol_type = other RNA
ctgaaaatttacttctggat

SEQ ID NO: 8368 - RNA, 20 nt, synthetic construct
  source 1..20: mol_type = other RNA
agctgaaaatttacttctgg

SEQ ID NO: 8369 - RNA, 20 nt, synthetic construct
  source 1..20: mol_type = other RNA
tgctatcaagatcatagata

SEQ ID NO: 8370 - RNA, 20 nt, synthetic construct
  source 1..20: mol_type = other RNA
tcaagatcatagataagacc

SEQ ID NO: 8371 - RNA, 20 nt, synthetic construct
  source 1..20: mol_type = other RNA
atcaagatcatagataagac

SEQ ID NO: 8372 - RNA, 20 nt, synthetic construct
  source 1..20: mol_type = other RNA
tatcaagatcatagataaga

SEQ ID NO: 8373 - RNA, 20 nt, synthetic construct
  source 1..20: mol_type = other RNA
ctatcaagatcatagataag

SEQ ID NO: 8374 - RNA, 20 nt, synthetic construct
  source 1..20: mol_type = other RNA
gctatcaagatcatagataa

SEQ ID NO: 8375 - RNA, 20 nt, synthetic construct
  source 1..20: mol_type = other RNA
cacagagatctgaaggctgg

SEQ ID NO: 8376 - RNA, 20 nt, synthetic construct
  source 1..20: mol_type = other RNA
acagagatctgaaggctggc

SEQ ID NO: 8377 - RNA, 20 nt, synthetic construct
  source 1..20: mol_type = other RNA
cagagatctgaaggctggca

SEQ ID NO: 8378 - RNA, 20 nt, synthetic construct
  source 1..20: mol_type = other RNA
agagatctgaaggctggcaa

SEQ ID NO: 8379 - RNA, 20 nt, synthetic construct
  source 1..20: mol_type = other RNA
gagatctgaaggctggcaac

SEQ ID NO: 8380 - RNA, 20 nt, synthetic construct
  source 1..20: mol_type = other RNA
ggcaacattctctttacctt

SEQ ID NO: 8381 - RNA, 20 nt, synthetic construct
  source 1..20: mol_type = other RNA
ggctggcaacattctcttta

SEQ ID NO: 8382 - RNA, 20 nt, synthetic construct
  source 1..20: mol_type = other RNA
gctggcaacattctctttac

SEQ ID NO: 8383 - RNA, 20 nt, synthetic construct
  source 1..20: mol_type = other RNA
ctggcaacattctctttacc

SEQ ID NO: 8384 - RNA, 20 nt, synthetic construct
  source 1..20: mol_type = other RNA
tggcaacattctctttacct

SEQ ID NO: 8385 - RNA, 20 nt, synthetic construct
  source 1..20: mol_type = other RNA
gcaacattctctttacctta

SEQ ID NO: 8386 - RNA, 20 nt, synthetic construct
  source 1..20: mol_type = other RNA
tgctgcaaaagtgattgaca

SEQ ID NO: 8387 - RNA, 20 nt, synthetic construct
  source 1..20: mol_type = other RNA
gctgcaaaagtgattgacac

SEQ ID NO: 8388 - RNA, 20 nt, synthetic construct
  source 1..20: mol_type = other RNA
ctgcaaaagtgattgacact

SEQ ID NO: 8389 - RNA, 20 nt, synthetic construct
  source 1..20: mol_type = other RNA
tgcaaaagtgattgacacta

SEQ ID NO: 8390 - RNA, 20 nt, synthetic construct
  source 1..20: mol_type = other RNA
gcaaaagtgattgacactaa

SEQ ID NO: 8391 - RNA, 20 nt, synthetic construct
  source 1..20: mol_type = other RNA
caaaagtgattgacactaaa

SEQ ID NO: 8392 - RNA, 20 nt, synthetic construct
  source 1..20: mol_type = other RNA
aaaagtgattgacactaaat

SEQ ID NO: 8393 - RNA, 20 nt, synthetic construct
  source 1..20: mol_type = other RNA
atagattacaatgtttgctt

SEQ ID NO: 8394 - RNA, 20 nt, synthetic construct
  source 1..20: mol_type = other RNA
tagattacaatgtttgcttt

SEQ ID NO: 8395 - RNA, 20 nt, synthetic construct
  source 1..20: mol_type = other RNA
catagattacaatgtttgct

SEQ ID NO: 8396 - RNA, 20 nt, synthetic construct
  source 1..20: mol_type = other RNA
acatagattacaatgtttgc

SEQ ID NO: 8397 - RNA, 20 nt, synthetic construct
  source 1..20: mol_type = other RNA
cacatagattacaatgtttg

SEQ ID NO: 8398 - RNA, 20 nt, synthetic construct
  source 1..20: mol_type = other RNA
ggagacagacatctggataa

SEQ ID NO: 8399 - RNA, 20 nt, synthetic construct
  source 1..20: mol_type = other RNA
gagacagacatctggataat

SEQ ID NO: 8400 - RNA, 20 nt, synthetic construct
  source 1..20: mol_type = other RNA
tggagacagacatctggata

SEQ ID NO: 8401 - RNA, 20 nt, synthetic construct
  source 1..20: mol_type = other RNA
ttggagacagacatctggat

SEQ ID NO: 8402 - RNA, 20 nt, synthetic construct
  source 1..20: mol_type = other RNA
cttggagacagacatctgga

SEQ ID NO: 8403 - RNA, 20 nt, synthetic construct
  source 1..20: mol_type = other RNA
ggataatgttcttatagata

SEQ ID NO: 8404 - RNA, 20 nt, synthetic construct
  source 1..20: mol_type = other RNA
ataatgttcttatagatatg

SEQ ID NO: 8405 - RNA, 20 nt, synthetic construct
  source 1..20: mol_type = other RNA
gataatgttcttatagatat

SEQ ID NO: 8406 - RNA, 20 nt, synthetic construct
  source 1..20: mol_type = other RNA
tggataatgttcttatagat

SEQ ID NO: 8407 - RNA, 20 nt, synthetic construct
  source 1..20: mol_type = other RNA
ctggataatgttcttataga

SEQ ID NO: 8408 - RNA, 20 nt, synthetic construct
  source 1..20: mol_type = other RNA
tctggataatgttcttatag

SEQ ID NO: 8409 - RNA, 20 nt, synthetic construct
  source 1..20: mol_type = other RNA
caaaggtaggatttaagact

SEQ ID NO: 8410 - RNA, 20 nt, synthetic construct
  source 1..20: mol_type = other RNA
tcaaaggtaggatttaagac

SEQ ID NO: 8411 - RNA, 20 nt, synthetic construct
  source 1..20: mol_type = other RNA
ttcaaaggtaggatttaaga

SEQ ID NO: 8412 - RNA, 20 nt, synthetic construct
  source 1..20: mol_type = other RNA
tttcaaaggtaggatttaag

SEQ ID NO: 8413 - RNA, 20 nt, synthetic construct
  source 1..20: mol_type = other RNA
ttgacagactttgggttcag

SEQ ID NO: 8414 - RNA, 20 nt, synthetic construct
  source 1..20: mol_type = other RNA
tgacagactttgggttcagc

SEQ ID NO: 8415 - RNA, 20 nt, synthetic construct
  source 1..20: mol_type = other RNA
gacagactttgggttcagca

SEQ ID NO: 8416 - RNA, 20 nt, synthetic construct
  source 1..20: mol_type = other RNA
acagactttgggttcagcaa

SEQ ID NO: 8417 - RNA, 20 nt, synthetic construct
  source 1..20: mol_type = other RNA
cagactttgggttcagcaac

SEQ ID NO: 8418 - RNA, 20 nt, synthetic construct
  source 1..20: mol_type = other RNA
cacagagacttaaaaccaga

SEQ ID NO: 8419 - RNA, 20 nt, synthetic construct
  source 1..20: mol_type = other RNA
ccagagaatgtagtcttctt

SEQ ID NO: 8420 - RNA, 20 nt, synthetic construct
  source 1..20: mol_type = other RNA
accagagaatgtagtcttct

SEQ ID NO: 8421 - RNA, 20 nt, synthetic construct
  source 1..20: mol_type = other RNA
cagagaatgtagtcttcttt

SEQ ID NO: 8422 - RNA, 20 nt, synthetic construct
  source 1..20: mol_type = other RNA
agagaatgtagtcttctttg

SEQ ID NO: 8423 - RNA, 20 nt, synthetic construct
  source 1..20: mol_type = other RNA
gagaatgtagtcttctttga

SEQ ID NO: 8424 - RNA, 20 nt, synthetic construct
  source 1..20: mol_type = other RNA
agaatgtagtcttctttgaa

SEQ ID NO: 8425 - RNA, 20 nt, synthetic construct
  source 1..20: mol_type = other RNA
ggcagtaaaagttattgaca

SEQ ID NO: 8426 - RNA, 20 nt, synthetic construct
  source 1..20: mol_type = other RNA
gcagtaaaagttattgacaa

SEQ ID NO: 8427 - RNA, 20 nt, synthetic construct
  source 1..20: mol_type = other RNA
cagtaaaagttattgacaag

SEQ ID NO: 8428 - RNA, 20 nt, synthetic construct
  source 1..20: mol_type = other RNA
agtaaaagttattgacaaga

SEQ ID NO: 8429 - RNA, 20 nt, synthetic construct
  source 1..20: mol_type = other RNA
gtaaaagttattgacaagac

SEQ ID NO: 8430 - RNA, 20 nt, synthetic construct
  source 1..20: mol_type = other RNA
taaaagttattgacaagaca

SEQ ID NO: 8431 - RNA, 20 nt, synthetic construct
  source 1..20: mol_type = other RNA
aaaagttattgacaagacaa

SEQ ID NO: 8432 - RNA, 20 nt, synthetic construct
  source 1..20: mol_type = other RNA
ctgtgactttgggaatgccc

SEQ ID NO: 8433 - RNA, 20 nt, synthetic construct
  source 1..20: mol_type = other RNA
tgtgactttgggaatgccca

SEQ ID NO: 8434 - RNA, 20 nt, synthetic construct
  source 1..20: mol_type = other RNA
atctgtgactttgggaatgc

SEQ ID NO: 8435 - RNA, 20 nt, synthetic construct
  source 1..20: mol_type = other RNA
tctgtgactttgggaatgcc

SEQ ID NO: 8436 - RNA, 20 nt, synthetic construct
  source 1..20: mol_type = other RNA
gtgactttgggaatgcccag

SEQ ID NO: 8437 - RNA, 20 nt, synthetic construct
  source 1..20: mol_type = other RNA
tgtggactttggcagtgccc

SEQ ID NO: 8438 - RNA, 20 nt, synthetic construct
  source 1..20: mol_type = other RNA
attgtggactttggcagtgc

SEQ ID NO: 8439 - RNA, 20 nt, synthetic construct
  source 1..20: mol_type = other RNA
ttgtggactttggcagtgcc

SEQ ID NO: 8440 - RNA, 20 nt, synthetic construct
  source 1..20: mol_type = other RNA
gtggactttggcagtgccca

SEQ ID NO: 8441 - RNA, 20 nt, synthetic construct
  source 1..20: mol_type = other RNA
tggactttggcagtgcccag

SEQ ID NO: 8442 - RNA, 20 nt, synthetic construct
  source 1..20: mol_type = other RNA
acctcgatgtcaaggtgagg

SEQ ID NO: 8443 - RNA, 20 nt, synthetic construct
  source 1..20: mol_type = other RNA
cctcgatgtcaaggtgaggt

SEQ ID NO: 8444 - RNA, 20 nt, synthetic construct
  source 1..20: mol_type = other RNA
ctcgatgtcaaggtgaggtg

SEQ ID NO: 8445 - RNA, 20 nt, synthetic construct
  source 1..20: mol_type = other RNA
tcgatgtcaaggtgaggtgg

SEQ ID NO: 8446 - RNA, 20 nt, synthetic construct
  source 1..20: mol_type = other RNA
cacctcgatgtcaaggtgag

SEQ ID NO: 8447 - RNA, 20 nt, synthetic construct
  source 1..20: mol_type = other RNA
cacctagacatcaagccaga

SEQ ID NO: 8448 - RNA, 20 nt, synthetic construct
  source 1..20: mol_type = other RNA
acctagacatcaagccagac

SEQ ID NO: 8449 - RNA, 20 nt, synthetic construct
  source 1..20: mol_type = other RNA
cctagacatcaagccagaca

SEQ ID NO: 8450 - RNA, 20 nt, synthetic construct
  source 1..20: mol_type = other RNA
ctagacatcaagccagacaa

SEQ ID NO: 8451 - RNA, 20 nt, synthetic construct
  source 1..20: mol_type = other RNA
tagacatcaagccagacaac

SEQ ID NO: 8452 - RNA, 20 nt, synthetic construct
  source 1..20: mol_type = other RNA
gcctgagaacctgctggtgt

SEQ ID NO: 8453 - RNA, 20 nt, synthetic construct
  source 1..20: mol_type = other RNA
cctgagaacctgctggtgtg

SEQ ID NO: 8454 - RNA, 20 nt, synthetic construct
  source 1..20: mol_type = other RNA
gagaacctgctggtgtggga

SEQ ID NO: 8455 - RNA, 20 nt, synthetic construct
  source 1..20: mol_type = other RNA
agaacctgctggtgtgggat

SEQ ID NO: 8456 - RNA, 20 nt, synthetic construct
  source 1..20: mol_type = other RNA
ctgagaacctgctggtgtgg

SEQ ID NO: 8457 - RNA, 20 nt, synthetic construct
  source 1..20: mol_type = other RNA
tgagaacctgctggtgtggg

SEQ ID NO: 8458 - RNA, 20 nt, synthetic construct
  source 1..20: mol_type = other RNA
gacaacctgctgctggcccc

SEQ ID NO: 8459 - RNA, 20 nt, synthetic construct
  source 1..20: mol_type = other RNA
gccagacaacctgctgctgg

SEQ ID NO: 8460 - RNA, 20 nt, synthetic construct
  source 1..20: mol_type = other RNA
ccagacaacctgctgctggc

SEQ ID NO: 8461 - RNA, 20 nt, synthetic construct
  source 1..20: mol_type = other RNA
cagacaacctgctgctggcc

SEQ ID NO: 8462 - RNA, 20 nt, synthetic construct
  source 1..20: mol_type = other RNA
agacaacctgctgctggccc

SEQ ID NO: 8463 - RNA, 20 nt, synthetic construct
  source 1..20: mol_type = other RNA
acaacctgctgctggcccct

SEQ ID NO: 8464 - RNA, 20 nt, synthetic construct
  source 1..20: mol_type = other RNA
ggccaagttcatccccagcc

SEQ ID NO: 8465 - RNA, 20 nt, synthetic construct
  source 1..20: mol_type = other RNA
gccaagttcatccccagcca

SEQ ID NO: 8466 - RNA, 20 nt, synthetic construct
  source 1..20: mol_type = other RNA
tgcggccaagttcatcccca

SEQ ID NO: 8467 - RNA, 20 nt, synthetic construct
  source 1..20: mol_type = other RNA
gcggccaagttcatccccag

SEQ ID NO: 8468 - RNA, 20 nt, synthetic construct
  source 1..20: mol_type = other RNA
cggccaagttcatccccagc

SEQ ID NO: 8469 - RNA, 20 nt, synthetic construct
  source 1..20: mol_type = other RNA
ccaagttcatccccagccag

SEQ ID NO: 8470 - RNA, 20 nt, synthetic construct
  source 1..20: mol_type = other RNA
gtggccaagatcgtgcccta

SEQ ID NO: 8471 - RNA, 20 nt, synthetic construct
  source 1..20: mol_type = other RNA
gccaagatcgtgccctatgc

SEQ ID NO: 8472 - RNA, 20 nt, synthetic construct
  source 1..20: mol_type = other RNA
cgtggccaagatcgtgccct

SEQ ID NO: 8473 - RNA, 20 nt, synthetic construct
  source 1..20: mol_type = other RNA
tggccaagatcgtgccctat

SEQ ID NO: 8474 - RNA, 20 nt, synthetic construct
  source 1..20: mol_type = other RNA
ggccaagatcgtgccctatg

SEQ ID NO: 8475 - RNA, 20 nt, synthetic construct
  source 1..20: mol_type = other RNA
ccaagatcgtgccctatgct

SEQ ID NO: 8476 - RNA, 20 nt, synthetic construct
  source 1..20: mol_type = other RNA
tggcggactttgggctggct

SEQ ID NO: 8477 - RNA, 20 nt, synthetic construct
  source 1..20: mol_type = other RNA
ggcggactttgggctggctc

SEQ ID NO: 8478 - RNA, 20 nt, synthetic construct
  source 1..20: mol_type = other RNA
gtggcggactttgggctggc

SEQ ID NO: 8479 - RNA, 20 nt, synthetic construct
  source 1..20: mol_type = other RNA
gcggactttgggctggctcg

SEQ ID NO: 8480 - RNA, 20 nt, synthetic construct
  source 1..20: mol_type = other RNA
cggactttgggctggctcgg

SEQ ID NO: 8481 - RNA, 20 nt, synthetic construct
  source 1..20: mol_type = other RNA
caccgggaccttcgtgcagc

SEQ ID NO: 8482 - RNA, 20 nt, synthetic construct
  source 1..20: mol_type = other RNA
accgggaccttcgtgcagcc

SEQ ID NO: 8483 - RNA, 20 nt, synthetic construct
  source 1..20: mol_type = other RNA
ccgggaccttcgtgcagcca

SEQ ID NO: 8484 - RNA, 20 nt, synthetic construct
  source 1..20: mol_type = other RNA
cgggaccttcgtgcagccaa

SEQ ID NO: 8485 - RNA, 20 nt, synthetic construct
  source 1..20: mol_type = other RNA
gggaccttcgtgcagccaac

SEQ ID NO: 8486 - RNA, 20 nt, synthetic construct
  source 1..20: mol_type = other RNA
gcagccaacatcctggtggg

SEQ ID NO: 8487 - RNA, 20 nt, synthetic construct
  source 1..20: mol_type = other RNA
agccaacatcctggtgggag

SEQ ID NO: 8488 - RNA, 20 nt, synthetic construct
  source 1..20: mol_type = other RNA
tgcagccaacatcctggtgg

SEQ ID NO: 8489 - RNA, 20 nt, synthetic construct
  source 1..20: mol_type = other RNA
cagccaacatcctggtggga

SEQ ID NO: 8490 - RNA, 20 nt, synthetic construct
  source 1..20: mol_type = other RNA
gccaacatcctggtgggaga

SEQ ID NO: 8491 - RNA, 20 nt, synthetic construct
  source 1..20: mol_type = other RNA
ccaacatcctggtgggagag

SEQ ID NO: 8492 - RNA, 20 nt, synthetic construct
  source 1..20: mol_type = other RNA
gccatcaaaaccctgaagcc

SEQ ID NO: 8493 - RNA, 20 nt, synthetic construct
  source 1..20: mol_type = other RNA
ccatcaaaaccctgaagcct

SEQ ID NO: 8494 - RNA, 20 nt, synthetic construct
  source 1..20: mol_type = other RNA
caaaaccctgaagcctggca

SEQ ID NO: 8495 - RNA, 20 nt, synthetic construct
  source 1..20: mol_type = other RNA
ggccatcaaaaccctgaagc

SEQ ID NO: 8496 - RNA, 20 nt, synthetic construct
  source 1..20: mol_type = other RNA
catcaaaaccctgaagcctg

SEQ ID NO: 8497 - RNA, 20 nt, synthetic construct
  source 1..20: mol_type = other RNA
atcaaaaccctgaagcctgg

SEQ ID NO: 8498 - RNA, 20 nt, synthetic construct
  source 1..20: mol_type = other RNA
tcaaaaccctgaagcctggc

SEQ ID NO: 8499 - RNA, 20 nt, synthetic construct
  source 1..20: mol_type = other RNA
ggctgacttcggcctggccc

SEQ ID NO: 8500 - RNA, 20 nt, synthetic construct
  source 1..20: mol_type = other RNA
tggctgacttcggcctggcc

SEQ ID NO: 8501 - RNA, 20 nt, synthetic construct
  source 1..20: mol_type = other RNA
ctgacttcggcctggcccgg

SEQ ID NO: 8502 - RNA, 20 nt, synthetic construct
  source 1..20: mol_type = other RNA
gctgacttcggcctggcccg

SEQ ID NO: 8503 - RNA, 20 nt, synthetic construct
  source 1..20: mol_type = other RNA
gtggctgacttcggcctggc

SEQ ID NO: 8504 - RNA, 20 nt, synthetic construct
  source 1..20: mol_type = other RNA
cgggacttggccgcccggaa

SEQ ID NO: 8505 - RNA, 20 nt, synthetic construct
  source 1..20: mol_type = other RNA
gggacttggccgcccggaac

SEQ ID NO: 8506 - RNA, 20 nt, synthetic construct
  source 1..20: mol_type = other RNA
ccgggacttggccgcccgga

SEQ ID NO: 8507 - RNA, 20 nt, synthetic construct
  source 1..20: mol_type = other RNA
accgggacttggccgcccgg

SEQ ID NO: 8508 - RNA, 20 nt, synthetic construct
  source 1..20: mol_type = other RNA
caccgggacttggccgcccg

SEQ ID NO: 8509 - RNA, 20 nt, synthetic construct
  source 1..20: mol_type = other RNA
ggaacgtgctcgtggacgac

SEQ ID NO: 8510 - RNA, 20 nt, synthetic construct
  source 1..20: mol_type = other RNA
cggaacgtgctcgtggacga

SEQ ID NO: 8511 - RNA, 20 nt, synthetic construct
  source 1..20: mol_type = other RNA
gcccggaacgtgctcgtgga

SEQ ID NO: 8512 - RNA, 20 nt, synthetic construct
  source 1..20: mol_type = other RNA
ccggaacgtgctcgtggacg

SEQ ID NO: 8513 - RNA, 20 nt, synthetic construct
  source 1..20: mol_type = other RNA
cccggaacgtgctcgtggac

SEQ ID NO: 8514 - RNA, 20 nt, synthetic construct
  source 1..20: mol_type = other RNA
cgcccggaacgtgctcgtgg

SEQ ID NO: 8515 - RNA, 20 nt, synthetic construct
  source 1..20: mol_type = other RNA
atcaaggtcatcaagtcagg

SEQ ID NO: 8516 - RNA, 20 nt, synthetic construct
  source 1..20: mol_type = other RNA
cgatcaaggtcatcaagtca

SEQ ID NO: 8517 - RNA, 20 nt, synthetic construct
  source 1..20: mol_type = other RNA
gcgatcaaggtcatcaagtc

SEQ ID NO: 8518 - RNA, 20 nt, synthetic construct
  source 1..20: mol_type = other RNA
tcaaggtcatcaagtcaggt

SEQ ID NO: 8519 - RNA, 20 nt, synthetic construct
  source 1..20: mol_type = other RNA
gatcaaggtcatcaagtcag

SEQ ID NO: 8520 - RNA, 20 nt, synthetic construct
  source 1..20: mol_type = other RNA
ggcgatcaaggtcatcaagt

SEQ ID NO: 8521 - RNA, 20 nt, synthetic construct
  source 1..20: mol_type = other RNA
ctgaccttggaaatgcttgt

SEQ ID NO: 8522 - RNA, 20 nt, synthetic construct
  source 1..20: mol_type = other RNA
ttgctgaccttggaaatgct

SEQ ID NO: 8523 - RNA, 20 nt, synthetic construct
  source 1..20: mol_type = other RNA
gctgaccttggaaatgcttg

SEQ ID NO: 8524 - RNA, 20 nt, synthetic construct
  source 1..20: mol_type = other RNA
tgctgaccttggaaatgctt

SEQ ID NO: 8525 - RNA, 20 nt, synthetic construct
  source 1..20: mol_type = other RNA
attgctgaccttggaaatgc

SEQ ID NO: 8526 - RNA, 20 nt, synthetic construct
  source 1..20: mol_type = other RNA
ctgacattaaaccagagaac

SEQ ID NO: 8527 - RNA, 20 nt, synthetic construct
  source 1..20: mol_type = other RNA
actgacattaaaccagagaa

SEQ ID NO: 8528 - RNA, 20 nt, synthetic construct
  source 1..20: mol_type = other RNA
cactgacattaaaccagaga

SEQ ID NO: 8529 - RNA, 20 nt, synthetic construct
  source 1..20: mol_type = other RNA
acactgacattaaaccagag

SEQ ID NO: 8530 - RNA, 20 nt, synthetic construct
  source 1..20: mol_type = other RNA
cacactgacattaaaccaga

SEQ ID NO: 8531 - RNA, 20 nt, synthetic construct
  source 1..20: mol_type = other RNA
agagaacatcttattgtcag

SEQ ID NO: 8532 - RNA, 20 nt, synthetic construct
  source 1..20: mol_type = other RNA
ccagagaacatcttattgtc

SEQ ID NO: 8533 - RNA, 20 nt, synthetic construct
  source 1..20: mol_type = other RNA
agaacatcttattgtcagtg

SEQ ID NO: 8534 - RNA, 20 nt, synthetic construct
  source 1..20: mol_type = other RNA
gagaacatcttattgtcagt

SEQ ID NO: 8535 - RNA, 20 nt, synthetic construct
  source 1..20: mol_type = other RNA
cagagaacatcttattgtca

SEQ ID NO: 8536 - RNA, 20 nt, synthetic construct
  source 1..20: mol_type = other RNA
accagagaacatcttattgt

SEQ ID NO: 8537 - RNA, 20 nt, synthetic construct
  source 1..20: mol_type = other RNA
atgaaagtagttaaaagtgc

SEQ ID NO: 8538 - RNA, 20 nt, synthetic construct
  source 1..20: mol_type = other RNA
gcaatgaaagtagttaaaag

SEQ ID NO: 8539 - RNA, 20 nt, synthetic construct
  source 1..20: mol_type = other RNA
gaaagtagttaaaagtgctg

SEQ ID NO: 8540 - RNA, 20 nt, synthetic construct
  source 1..20: mol_type = other RNA
tgaaagtagttaaaagtgct

SEQ ID NO: 8541 - RNA, 20 nt, synthetic construct
  source 1..20: mol_type = other RNA
aatgaaagtagttaaaagtg

SEQ ID NO: 8542 - RNA, 20 nt, synthetic construct
  source 1..20: mol_type = other RNA
caatgaaagtagttaaaagt

SEQ ID NO: 8543 - RNA, 20 nt, synthetic construct
  source 1..20: mol_type = other RNA
ggcaatgaaagtagttaaaa

SEQ ID NO: 8544 - RNA, 20 nt, synthetic construct
  source 1..20: mol_type = other RNA
ctgacctgggaaatgcttgt

SEQ ID NO: 8545 - RNA, 20 nt, synthetic construct
  source 1..20: mol_type = other RNA
ttgctgacctgggaaatgct

SEQ ID NO: 8546 - RNA, 20 nt, synthetic construct
  source 1..20: mol_type = other RNA
gctgacctgggaaatgcttg

SEQ ID NO: 8547 - RNA, 20 nt, synthetic construct
  source 1..20: mol_type = other RNA
tgctgacctgggaaatgctt

SEQ ID NO: 8548 - RNA, 20 nt, synthetic construct
  source 1..20: mol_type = other RNA
attgctgacctgggaaatgc

SEQ ID NO: 8549 - RNA, 20 nt, synthetic construct
  source 1..20: mol_type = other RNA
ctgacataaagccggaaaat

SEQ ID NO: 8550 - RNA, 20 nt, synthetic construct
  source 1..20: mol_type = other RNA
actgacataaagccggaaaa

SEQ ID NO: 8551 - RNA, 20 nt, synthetic construct
  source 1..20: mol_type = other RNA
tactgacataaagccggaaa

SEQ ID NO: 8552 - RNA, 20 nt, synthetic construct
  source 1..20: mol_type = other RNA
atactgacataaagccggaa

SEQ ID NO: 8553 - RNA, 20 nt, synthetic construct
  source 1..20: mol_type = other RNA
catactgacataaagccgga

SEQ ID NO: 8554 - RNA, 20 nt, synthetic construct
  source 1..20: mol_type = other RNA
gaaaatatcttgatgtgtgt

SEQ ID NO: 8555 - RNA, 20 nt, synthetic construct
  source 1..20: mol_type = other RNA
ggaaaatatcttgatgtgtg

SEQ ID NO: 8556 - RNA, 20 nt, synthetic construct
  source 1..20: mol_type = other RNA
ccggaaaatatcttgatgtg

SEQ ID NO: 8557 - RNA, 20 nt, synthetic construct
  source 1..20: mol_type = other RNA
aaaatatcttgatgtgtgtg

SEQ ID NO: 8558 - RNA, 20 nt, synthetic construct
  source 1..20: mol_type = other RNA
cggaaaatatcttgatgtgt

SEQ ID NO: 8559 - RNA, 20 nt, synthetic construct
  source 1..20: mol_type = other RNA
gccggaaaatatcttgatgt

SEQ ID NO: 8560 - RNA, 20 nt, synthetic construct
  source 1..20: mol_type = other RNA
tcgcagacctgggcaacgcc

SEQ ID NO: 8561 - RNA, 20 nt, synthetic construct
  source 1..20: mol_type = other RNA
cagacctgggcaacgcctgc

SEQ ID NO: 8562 - RNA, 20 nt, synthetic construct
  source 1..20: mol_type = other RNA
atcgcagacctgggcaacgc

SEQ ID NO: 8563 - RNA, 20 nt, synthetic construct
  source 1..20: mol_type = other RNA
cgcagacctgggcaacgcct

SEQ ID NO: 8564 - RNA, 20 nt, synthetic construct
  source 1..20: mol_type = other RNA
gcagacctgggcaacgcctg

SEQ ID NO: 8565 - RNA, 20 nt, synthetic construct
  source 1..20: mol_type = other RNA
cacacggacatcaagcccga

SEQ ID NO: 8566 - RNA, 20 nt, synthetic construct
  source 1..20: mol_type = other RNA
acacggacatcaagcccgag

SEQ ID NO: 8567 - RNA, 20 nt, synthetic construct
  source 1..20: mol_type = other RNA
cacggacatcaagcccgaga

SEQ ID NO: 8568 - RNA, 20 nt, synthetic construct
  source 1..20: mol_type = other RNA
acggacatcaagcccgagaa

SEQ ID NO: 8569 - RNA, 20 nt, synthetic construct
  source 1..20: mol_type = other RNA
cggacatcaagcccgagaac

SEQ ID NO: 8570 - RNA, 20 nt, synthetic construct
  source 1..20: mol_type = other RNA
cccgagaacatcttgctgtg

SEQ ID NO: 8571 - RNA, 20 nt, synthetic construct
  source 1..20: mol_type = other RNA
cgagaacatcttgctgtgtg

SEQ ID NO: 8572 - RNA, 20 nt, synthetic construct
  source 1..20: mol_type = other RNA
gagaacatcttgctgtgtgt

SEQ ID NO: 8573 - RNA, 20 nt, synthetic construct
  source 1..20: mol_type = other RNA
agaacatcttgctgtgtgtg

SEQ ID NO: 8574 - RNA, 20 nt, synthetic construct
  source 1..20: mol_type = other RNA
gcccgagaacatcttgctgt

SEQ ID NO: 8575 - RNA, 20 nt, synthetic construct
  source 1..20: mol_type = other RNA
ccgagaacatcttgctgtgt

SEQ ID NO: 8576 - RNA, 20 nt, synthetic construct
  source 1..20: mol_type = other RNA
gccctcaaagtggtgaagag

SEQ ID NO: 8577 - RNA, 20 nt, synthetic construct
  source 1..20: mol_type = other RNA
cctcaaagtggtgaagagtg

SEQ ID NO: 8578 - RNA, 20 nt, synthetic construct
  source 1..20: mol_type = other RNA
ctcaaagtggtgaagagtgc

SEQ ID NO: 8579 - RNA, 20 nt, synthetic construct
  source 1..20: mol_type = other RNA
tcaaagtggtgaagagtgcg

SEQ ID NO: 8580 - RNA, 20 nt, synthetic construct
  source 1..20: mol_type = other RNA
caaagtggtgaagagtgcgg

SEQ ID NO: 8581 - RNA, 20 nt, synthetic construct
  source 1..20: mol_type = other RNA
ggccctcaaagtggtgaaga

SEQ ID NO: 8582 - RNA, 20 nt, synthetic construct
  source 1..20: mol_type = other RNA
ccctcaaagtggtgaagagt

SEQ ID NO: 8583 - RNA, 20 nt, synthetic construct
  source 1..20: mol_type = other RNA
gcagctgactttggtgtgtc

SEQ ID NO: 8584 - RNA, 20 nt, synthetic construct
  source 1..20: mol_type = other RNA
ctgactttggtgtgtctgcc

SEQ ID NO: 8585 - RNA, 20 nt, synthetic construct
  source 1..20: mol_type = other RNA
gctgactttggtgtgtctgc

SEQ ID NO: 8586 - RNA, 20 nt, synthetic construct
  source 1..20: mol_type = other RNA
agctgactttggtgtgtctg

SEQ ID NO: 8587 - RNA, 20 nt, synthetic construct
  source 1..20: mol_type = other RNA
cagctgactttggtgtgtct

SEQ ID NO: 8588 - RNA, 20 nt, synthetic construct
  source 1..20: mol_type = other RNA
cgagatctgaaagctggcaa

SEQ ID NO: 8589 - RNA, 20 nt, synthetic construct
  source 1..20: mol_type = other RNA
gagatctgaaagctggcaac

SEQ ID NO: 8590 - RNA, 20 nt, synthetic construct
  source 1..20: mol_type = other RNA
ccgagatctgaaagctggca

SEQ ID NO: 8591 - RNA, 20 nt, synthetic construct
  source 1..20: mol_type = other RNA
accgagatctgaaagctggc

SEQ ID NO: 8592 - RNA, 20 nt, synthetic construct
  source 1..20: mol_type = other RNA
caccgagatctgaaagctgg

SEQ ID NO: 8593 - RNA, 20 nt, synthetic construct
  source 1..20: mol_type = other RNA
ggcaacgtgctgatgaccct

SEQ ID NO: 8594 - RNA, 20 nt, synthetic construct
  source 1..20: mol_type = other RNA
gcaacgtgctgatgaccctc

SEQ ID NO: 8595 - RNA, 20 nt, synthetic construct
  source 1..20: mol_type = other RNA
tggcaacgtgctgatgaccc

SEQ ID NO: 8596 - RNA, 20 nt, synthetic construct
  source 1..20: mol_type = other RNA
ctggcaacgtgctgatgacc

SEQ ID NO: 8597 - RNA, 20 nt, synthetic construct
  source 1..20: mol_type = other RNA
gctggcaacgtgctgatgac

SEQ ID NO: 8598 - RNA, 20 nt, synthetic construct
  source 1..20: mol_type = other RNA
agctggcaacgtgctgatga

SEQ ID NO: 8599 - RNA, 20 nt, synthetic construct
  source 1..20: mol_type = other RNA
ccaaagtcattgaaaccaag

SEQ ID NO: 8600 - RNA, 20 nt, synthetic construct
  source 1..20: mol_type = other RNA
ggccaaagtcattgaaacca

SEQ ID NO: 8601 - RNA, 20 nt, synthetic construct
  source 1..20: mol_type = other RNA
caaagtcattgaaaccaaga

SEQ ID NO: 8602 - RNA, 20 nt, synthetic construct
  source 1..20: mol_type = other RNA
gccaaagtcattgaaaccaa

SEQ ID NO: 8603 - RNA, 20 nt, synthetic construct
  source 1..20: mol_type = other RNA
cggccaaagtcattgaaacc

SEQ ID NO: 8604 - RNA, 20 nt, synthetic construct
  source 1..20: mol_type = other RNA
gcggccaaagtcattgaaac

SEQ ID NO: 8605 - RNA, 20 nt, synthetic construct
  source 1..20: mol_type = other RNA
tgcggccaaagtcattgaaa

SEQ ID NO: 8606 - RNA, 20 nt, synthetic construct
  source 1..20: mol_type = other RNA
atctccgacctgggcgtggc

SEQ ID NO: 8607 - RNA, 20 nt, synthetic construct
  source 1..20: mol_type = other RNA
ctccgacctgggcgtggccg

SEQ ID NO: 8608 - RNA, 20 nt, synthetic construct
  source 1..20: mol_type = other RNA
tccgacctgggcgtggccga

SEQ ID NO: 8609 - RNA, 20 nt, synthetic construct
  source 1..20: mol_type = other RNA
tctccgacctgggcgtggcc

SEQ ID NO: 8610 - RNA, 20 nt, synthetic construct
  source 1..20: mol_type = other RNA
ccgacctgggcgtggccgag

SEQ ID NO: 8611 - RNA, 20 nt, synthetic construct
  source 1..20: mol_type = other RNA
cacaaggacatcaagccggg

SEQ ID NO: 8612 - RNA, 20 nt, synthetic construct
  source 1..20: mol_type = other RNA
acaaggacatcaagccgggg

SEQ ID NO: 8613 - RNA, 20 nt, synthetic construct
  source 1..20: mol_type = other RNA
caaggacatcaagccgggga

SEQ ID NO: 8614 - RNA, 20 nt, synthetic construct
  source 1..20: mol_type = other RNA
aaggacatcaagccggggaa

SEQ ID NO: 8615 - RNA, 20 nt, synthetic construct
  source 1..20: mol_type = other RNA
aggacatcaagccggggaac

SEQ ID NO: 8616 - RNA, 20 nt, synthetic construct
  source 1..20: mol_type = other RNA
gggaacctgctgctcaccac

SEQ ID NO: 8617 - RNA, 20 nt, synthetic construct
  source 1..20: mol_type = other RNA
ggaacctgctgctcaccacc

SEQ ID NO: 8618 - RNA, 20 nt, synthetic construct
  source 1..20: mol_type = other RNA
gccggggaacctgctgctca

SEQ ID NO: 8619 - RNA, 20 nt, synthetic construct
  source 1..20: mol_type = other RNA
ccggggaacctgctgctcac

SEQ ID NO: 8620 - RNA, 20 nt, synthetic construct
  source 1..20: mol_type = other RNA
cggggaacctgctgctcacc

SEQ ID NO: 8621 - RNA, 20 nt, synthetic construct
  source 1..20: mol_type = other RNA
ggggaacctgctgctcacca

SEQ ID NO: 8622 - RNA, 20 nt, synthetic construct
  source 1..20: mol_type = other RNA
ggccgtcaagatcctcaaga

SEQ ID NO: 8623 - RNA, 20 nt, synthetic construct
  source 1..20: mol_type = other RNA
cgtcaagatcctcaagaaga

SEQ ID NO: 8624 - RNA, 20 nt, synthetic construct
  source 1..20: mol_type = other RNA
gccgtcaagatcctcaagaa

SEQ ID NO: 8625 - RNA, 20 nt, synthetic construct
  source 1..20: mol_type = other RNA
ccgtcaagatcctcaagaag

SEQ ID NO: 8626 - RNA, 20 nt, synthetic construct
  source 1..20: mol_type = other RNA
gtcaagatcctcaagaagaa

SEQ ID NO: 8627 - RNA, 20 nt, synthetic construct
  source 1..20: mol_type = other RNA
tcaagatcctcaagaagaag

SEQ ID NO: 8628 - RNA, 20 nt, synthetic construct
  source 1..20: mol_type = other RNA
ttaatggacttgggttccat

SEQ ID NO: 8629 - RNA, 20 nt, synthetic construct
  source 1..20: mol_type = other RNA
taatggacttgggttccatg

SEQ ID NO: 8630 - RNA, 20 nt, synthetic construct
  source 1..20: mol_type = other RNA
aatggacttgggttccatga

SEQ ID NO: 8631 - RNA, 20 nt, synthetic construct
  source 1..20: mol_type = other RNA
atggacttgggttccatgaa

SEQ ID NO: 8632 - RNA, 20 nt, synthetic construct
  source 1..20: mol_type = other RNA
tggacttgggttccatgaat

SEQ ID NO: 8633 - RNA, 20 nt, synthetic construct
  source 1..20: mol_type = other RNA
tacagagacttgaagcccac

SEQ ID NO: 8634 - RNA, 20 nt, synthetic construct
  source 1..20: mol_type = other RNA
acagagacttgaagcccacc

SEQ ID NO: 8635 - RNA, 20 nt, synthetic construct
  source 1..20: mol_type = other RNA
cagagacttgaagcccacca

SEQ ID NO: 8636 - RNA, 20 nt, synthetic construct
  source 1..20: mol_type = other RNA
agagacttgaagcccaccaa

SEQ ID NO: 8637 - RNA, 20 nt, synthetic construct
  source 1..20: mol_type = other RNA
gagacttgaagcccaccaat

SEQ ID NO: 8638 - RNA, 20 nt, synthetic construct
  source 1..20: mol_type = other RNA
cccaccaatatattgcttgg

SEQ ID NO: 8639 - RNA, 20 nt, synthetic construct
  source 1..20: mol_type = other RNA
accaatatattgcttggaga

SEQ ID NO: 8640 - RNA, 20 nt, synthetic construct
  source 1..20: mol_type = other RNA
gcccaccaatatattgcttg

SEQ ID NO: 8641 - RNA, 20 nt, synthetic construct
  source 1..20: mol_type = other RNA
ccaccaatatattgcttgga

SEQ ID NO: 8642 - RNA, 20 nt, synthetic construct
  source 1..20: mol_type = other RNA
caccaatatattgcttggag

SEQ ID NO: 8643 - RNA, 20 nt, synthetic construct
  source 1..20: mol_type = other RNA
ccaatatattgcttggagat

SEQ ID NO: 8644 - RNA, 20 nt, synthetic construct
  source 1..20: mol_type = other RNA
ctgaagcgaatcctgtgtca

SEQ ID NO: 8645 - RNA, 20 nt, synthetic construct
  source 1..20: mol_type = other RNA
cgccctgaagcgaatcctgt

SEQ ID NO: 8646 - RNA, 20 nt, synthetic construct
  source 1..20: mol_type = other RNA
gccctgaagcgaatcctgtg

SEQ ID NO: 8647 - RNA, 20 nt, synthetic construct
  source 1..20: mol_type = other RNA
ccctgaagcgaatcctgtgt

SEQ ID NO: 8648 - RNA, 20 nt, synthetic construct
  source 1..20: mol_type = other RNA
cctgaagcgaatcctgtgtc

SEQ ID NO: 8649 - RNA, 20 nt, synthetic construct
  source 1..20: mol_type = other RNA
tgaagcgaatcctgtgtcac

SEQ ID NO: 8650 - RNA, 20 nt, synthetic construct
  source 1..20: mol_type = other RNA
catcttgatttgaaggtaag

SEQ ID NO: 8651 - RNA, 20 nt, synthetic construct
  source 1..20: mol_type = other RNA
atcttgatttgaaggtaaga

SEQ ID NO: 8652 - RNA, 20 nt, synthetic construct
  source 1..20: mol_type = other RNA
tcttgatttgaaggtaagat

SEQ ID NO: 8653 - RNA, 20 nt, synthetic construct
  source 1..20: mol_type = other RNA
cttgatttgaaggtaagatt

SEQ ID NO: 8654 - RNA, 20 nt, synthetic construct
  source 1..20: mol_type = other RNA
ttgatttgaaggtaagattc

SEQ ID NO: 8655 - RNA, 20 nt, synthetic construct
  source 1..20: mol_type = other RNA
ctcagaatattctgttgaca

SEQ ID NO: 8656 - RNA, 20 nt, synthetic construct
  source 1..20: mol_type = other RNA
cagaatattctgttgacaag

SEQ ID NO: 8657 - RNA, 20 nt, synthetic construct
  source 1..20: mol_type = other RNA
gcctcagaatattctgttga

SEQ ID NO: 8658 - RNA, 20 nt, synthetic construct
  source 1..20: mol_type = other RNA
cctcagaatattctgttgac

SEQ ID NO: 8659 - RNA, 20 nt, synthetic construct
  source 1..20: mol_type = other RNA
tcagaatattctgttgacaa

SEQ ID NO: 8660 - RNA, 20 nt, synthetic construct
  source 1..20: mol_type = other RNA
agaatattctgttgacaagt

SEQ ID NO: 8661 - RNA, 20 nt, synthetic construct
  source 1..20: mol_type = other RNA
ctgcaaagttcatgagaaaa

SEQ ID NO: 8662 - RNA, 20 nt, synthetic construct
  source 1..20: mol_type = other RNA
tgctgcaaagttcatgagaa

SEQ ID NO: 8663 - RNA, 20 nt, synthetic construct
  source 1..20: mol_type = other RNA
gctgcaaagttcatgagaaa

SEQ ID NO: 8664 - RNA, 20 nt, synthetic construct
  source 1..20: mol_type = other RNA
ttgatttaaaggtaacgtaa

SEQ ID NO: 8665 - RNA, 20 nt, synthetic construct
  source 1..20: mol_type = other RNA
cttgatttaaaggtaacgta

SEQ ID NO: 8666 - RNA, 20 nt, synthetic construct
  source 1..20: mol_type = other RNA
ccttgatttaaaggtaacgt

SEQ ID NO: 8667 - RNA, 20 nt, synthetic construct
  source 1..20: mol_type = other RNA
accttgatttaaaggtaacg

SEQ ID NO: 8668 - RNA, 20 nt, synthetic construct
  source 1..20: mol_type = other RNA
caccttgatttaaaggtaac

SEQ ID NO: 8669 - RNA, 20 nt, synthetic construct
  source 1..20: mol_type = other RNA
cacagaatatattactgagc

SEQ ID NO: 8670 - RNA, 20 nt, synthetic construct
  source 1..20: mol_type = other RNA
agaatatattactgagcagc

SEQ ID NO: 8671 - RNA, 20 nt, synthetic construct
  source 1..20: mol_type = other RNA
cagaatatattactgagcag

SEQ ID NO: 8672 - RNA, 20 nt, synthetic construct
  source 1..20: mol_type = other RNA
acagaatatattactgagca

SEQ ID NO: 8673 - RNA, 20 nt, synthetic construct
  source 1..20: mol_type = other RNA
ccacagaatatattactgag

SEQ ID NO: 8674 - RNA, 20 nt, synthetic construct
  source 1..20: mol_type = other RNA
gccacagaatatattactga

SEQ ID NO: 8675 - RNA, 20 nt, synthetic construct
  source 1..20: mol_type = other RNA
tggcggactttggcgtggct

SEQ ID NO: 8676 - RNA, 20 nt, synthetic construct
  source 1..20: mol_type = other RNA
ctggcggactttggcgtggc

SEQ ID NO: 8677 - RNA, 20 nt, synthetic construct
  source 1..20: mol_type = other RNA
cggactttggcgtggctggc

SEQ ID NO: 8678 - RNA, 20 nt, synthetic construct
  source 1..20: mol_type = other RNA
gcggactttggcgtggctgg

SEQ ID NO: 8679 - RNA, 20 nt, synthetic construct
  source 1..20: mol_type = other RNA
ggcggactttggcgtggctg

SEQ ID NO: 8680 - RNA, 20 nt, synthetic construct
  source 1..20: mol_type = other RNA
cagagacattaaaggtaaga

SEQ ID NO: 8681 - RNA, 20 nt, synthetic construct
  source 1..20: mol_type = other RNA
acagagacattaaaggtaag

SEQ ID NO: 8682 - RNA, 20 nt, synthetic construct
  source 1..20: mol_type = other RNA
gagacattaaaggtaagagg

SEQ ID NO: 8683 - RNA, 20 nt, synthetic construct
  source 1..20: mol_type = other RNA
agagacattaaaggtaagag

SEQ ID NO: 8684 - RNA, 20 nt, synthetic construct
  source 1..20: mol_type = other RNA
cacagagacattaaaggtaa

SEQ ID NO: 8685 - RNA, 20 nt, synthetic construct
  source 1..20: mol_type = other RNA
ggccaacgtcctgctgtctg

SEQ ID NO: 8686 - RNA, 20 nt, synthetic construct
  source 1..20: mol_type = other RNA
gcggccaacgtcctgctgtc

SEQ ID NO: 8687 - RNA, 20 nt, synthetic construct
  source 1..20: mol_type = other RNA
ccaacgtcctgctgtctgag

SEQ ID NO: 8688 - RNA, 20 nt, synthetic construct
  source 1..20: mol_type = other RNA
gccaacgtcctgctgtctga

SEQ ID NO: 8689 - RNA, 20 nt, synthetic construct
  source 1..20: mol_type = other RNA
cggccaacgtcctgctgtct

SEQ ID NO: 8690 - RNA, 20 nt, synthetic construct
  source 1..20: mol_type = other RNA
agcggccaacgtcctgctgt

SEQ ID NO: 8691 - RNA, 20 nt, synthetic construct
  source 1..20: mol_type = other RNA
ataaagatcattgatctgga

SEQ ID NO: 8692 - RNA, 20 nt, synthetic construct
  source 1..20: mol_type = other RNA
gccataaagatcattgatct

SEQ ID NO: 8693 - RNA, 20 nt, synthetic construct
  source 1..20: mol_type = other RNA
tgccataaagatcattgatc

SEQ ID NO: 8694 - RNA, 20 nt, synthetic construct
  source 1..20: mol_type = other RNA
taaagatcattgatctggaa

SEQ ID NO: 8695 - RNA, 20 nt, synthetic construct
  source 1..20: mol_type = other RNA
cataaagatcattgatctgg

SEQ ID NO: 8696 - RNA, 20 nt, synthetic construct
  source 1..20: mol_type = other RNA
ccataaagatcattgatctg

SEQ ID NO: 8697 - RNA, 20 nt, synthetic construct
  source 1..20: mol_type = other RNA
ggcggactttggggtagcag

SEQ ID NO: 8698 - RNA, 20 nt, synthetic construct
  source 1..20: mol_type = other RNA
tggcggactttggggtagca

SEQ ID NO: 8699 - RNA, 20 nt, synthetic construct
  source 1..20: mol_type = other RNA
ctggcggactttggggtagc

SEQ ID NO: 8700 - RNA, 20 nt, synthetic construct
  source 1..20: mol_type = other RNA
cggactttggggtagcaggg

SEQ ID NO: 8701 - RNA, 20 nt, synthetic construct
  source 1..20: mol_type = other RNA
gcggactttggggtagcagg

SEQ ID NO: 8702 - RNA, 20 nt, synthetic construct
  source 1..20: mol_type = other RNA
gagacatcaaaggtcctgct

SEQ ID NO: 8703 - RNA, 20 nt, synthetic construct
  source 1..20: mol_type = other RNA
cgagacatcaaaggtcctgc

SEQ ID NO: 8704 - RNA, 20 nt, synthetic construct
  source 1..20: mol_type = other RNA
caccgagacatcaaaggtcc

SEQ ID NO: 8705 - RNA, 20 nt, synthetic construct
  source 1..20: mol_type = other RNA
ccgagacatcaaaggtcctg

SEQ ID NO: 8706 - RNA, 20 nt, synthetic construct
  source 1..20: mol_type = other RNA
accgagacatcaaaggtcct

SEQ ID NO: 8707 - RNA, 20 nt, synthetic construct
  source 1..20: mol_type = other RNA
tgccaacgtgctactctcgg

SEQ ID NO: 8708 - RNA, 20 nt, synthetic construct
  source 1..20: mol_type = other RNA
gctgccaacgtgctactctc

SEQ ID NO: 8709 - RNA, 20 nt, synthetic construct
  source 1..20: mol_type = other RNA
agctgccaacgtgctactct

SEQ ID NO: 8710 - RNA, 20 nt, synthetic construct
  source 1..20: mol_type = other RNA
ccaacgtgctactctcggag

SEQ ID NO: 8711 - RNA, 20 nt, synthetic construct
  source 1..20: mol_type = other RNA
gccaacgtgctactctcgga

SEQ ID NO: 8712 - RNA, 20 nt, synthetic construct
  source 1..20: mol_type = other RNA
ctgccaacgtgctactctcg

SEQ ID NO: 8713 - RNA, 20 nt, synthetic construct
  source 1..20: mol_type = other RNA
atcaagatcatcgacctgga

SEQ ID NO: 8714 - RNA, 20 nt, synthetic construct
  source 1..20: mol_type = other RNA
catcaagatcatcgacctgg

SEQ ID NO: 8715 - RNA, 20 nt, synthetic construct
  source 1..20: mol_type = other RNA
gccatcaagatcatcgacct

SEQ ID NO: 8716 - RNA, 20 nt, synthetic construct
  source 1..20: mol_type = other RNA
ggccatcaagatcatcgacc

SEQ ID NO: 8717 - RNA, 20 nt, synthetic construct
  source 1..20: mol_type = other RNA
tcaagatcatcgacctggag

SEQ ID NO: 8718 - RNA, 20 nt, synthetic construct
  source 1..20: mol_type = other RNA
ccatcaagatcatcgacctg

SEQ ID NO: 8719 - RNA, 20 nt, synthetic construct
  source 1..20: mol_type = other RNA
caccgagacataaaaggtat

SEQ ID NO: 8720 - RNA, 20 nt, synthetic construct
  source 1..20: mol_type = other RNA
accgagacataaaaggtata

SEQ ID NO: 8721 - RNA, 20 nt, synthetic construct
  source 1..20: mol_type = other RNA
ccgagacataaaaggtatac

SEQ ID NO: 8722 - RNA, 20 nt, synthetic construct
  source 1..20: mol_type = other RNA
cgagacataaaaggtataca

SEQ ID NO: 8723 - RNA, 20 nt, synthetic construct
  source 1..20: mol_type = other RNA
gagacataaaaggtatacaa

SEQ ID NO: 8724 - RNA, 20 nt, synthetic construct
  source 1..20: mol_type = other RNA
gctgccaatgtcttgctctc

SEQ ID NO: 8725 - RNA, 20 nt, synthetic construct
  source 1..20: mol_type = other RNA
agctgccaatgtcttgctct

SEQ ID NO: 8726 - RNA, 20 nt, synthetic construct
  source 1..20: mol_type = other RNA
ctgccaatgtcttgctctca

SEQ ID NO: 8727 - RNA, 20 nt, synthetic construct
  source 1..20: mol_type = other RNA
tgccaatgtcttgctctcag

SEQ ID NO: 8728 - RNA, 20 nt, synthetic construct
  source 1..20: mol_type = other RNA
gccaatgtcttgctctcaga

SEQ ID NO: 8729 - RNA, 20 nt, synthetic construct
  source 1..20: mol_type = other RNA
ccaatgtcttgctctcagaa

SEQ ID NO: 8730 - RNA, 20 nt, synthetic construct
  source 1..20: mol_type = other RNA
gctattaaaatcatagacct

SEQ ID NO: 8731 - RNA, 20 nt, synthetic construct
  source 1..20: mol_type = other RNA
tattaaaatcatagaccttg

SEQ ID NO: 8732 - RNA, 20 nt, synthetic construct
  source 1..20: mol_type = other RNA
attaaaatcatagaccttga

SEQ ID NO: 8733 - RNA, 20 nt, synthetic construct
  source 1..20: mol_type = other RNA
tgctattaaaatcatagacc

SEQ ID NO: 8734 - RNA, 20 nt, synthetic construct
  source 1..20: mol_type = other RNA
ctattaaaatcatagacctt

SEQ ID NO: 8735 - RNA, 20 nt, synthetic construct
  source 1..20: mol_type = other RNA
ttaaaatcatagaccttgag

SEQ ID NO: 8736 - RNA, 20 nt, synthetic construct
  source 1..20: mol_type = other RNA
taaaatcatagaccttgagg

SEQ ID NO: 8737 - RNA, 20 nt, synthetic construct
  source 1..20: mol_type = other RNA
gagatataaaagctggaaat

SEQ ID NO: 8738 - RNA, 20 nt, synthetic construct
  source 1..20: mol_type = other RNA
agagatataaaagctggaaa

SEQ ID NO: 8739 - RNA, 20 nt, synthetic construct
  source 1..20: mol_type = other RNA
cagagatataaaagctggaa

SEQ ID NO: 8740 - RNA, 20 nt, synthetic construct
  source 1..20: mol_type = other RNA
acagagatataaaagctgga

SEQ ID NO: 8741 - RNA, 20 nt, synthetic construct
  source 1..20: mol_type = other RNA
cacagagatataaaagctgg

SEQ ID NO: 8742 - RNA, 20 nt, synthetic construct
  source 1..20: mol_type = other RNA
ggaaatattctcctcaatac

SEQ ID NO: 8743 - RNA, 20 nt, synthetic construct
  source 1..20: mol_type = other RNA
gaaatattctcctcaataca

SEQ ID NO: 8744 - RNA, 20 nt, synthetic construct
  source 1..20: mol_type = other RNA
tggaaatattctcctcaata

SEQ ID NO: 8745 - RNA, 20 nt, synthetic construct
  source 1..20: mol_type = other RNA
ctggaaatattctcctcaat

SEQ ID NO: 8746 - RNA, 20 nt, synthetic construct
  source 1..20: mol_type = other RNA
gctggaaatattctcctcaa

SEQ ID NO: 8747 - RNA, 20 nt, synthetic construct
  source 1..20: mol_type = other RNA
agctggaaatattctcctca

SEQ ID NO: 8748 - RNA, 20 nt, synthetic construct
  source 1..20: mol_type = other RNA
gcaattaaacaagtacctgt

SEQ ID NO: 8749 - RNA, 20 nt, synthetic construct
  source 1..20: mol_type = other RNA
taaacaagtacctgttgaat

SEQ ID NO: 8750 - RNA, 20 nt, synthetic construct
  source 1..20: mol_type = other RNA
ttaaacaagtacctgttgaa

SEQ ID NO: 8751 - RNA, 20 nt, synthetic construct
  source 1..20: mol_type = other RNA
attaaacaagtacctgttga

SEQ ID NO: 8752 - RNA, 20 nt, synthetic construct
  source 1..20: mol_type = other RNA
aattaaacaagtacctgttg

SEQ ID NO: 8753 - RNA, 20 nt, synthetic construct
  source 1..20: mol_type = other RNA
caattaaacaagtacctgtt

SEQ ID NO: 8754 - RNA, 20 nt, synthetic construct
  source 1..20: mol_type = other RNA
cgcaattaaacaagtacctg

SEQ ID NO: 8755 - RNA, 20 nt, synthetic construct
  source 1..20: mol_type = other RNA
acaatgtatttgctttaaac

SEQ ID NO: 8756 - RNA, 20 nt, synthetic construct
  source 1..20: mol_type = other RNA
tcagaacaatgtatttgctt

SEQ ID NO: 8757 - RNA, 20 nt, synthetic construct
  source 1..20: mol_type = other RNA
cagaacaatgtatttgcttt

SEQ ID NO: 8758 - RNA, 20 nt, synthetic construct
  source 1..20: mol_type = other RNA
agaacaatgtatttgcttta

SEQ ID NO: 8759 - RNA, 20 nt, synthetic construct
  source 1..20: mol_type = other RNA
gaacaatgtatttgctttaa

SEQ ID NO: 8760 - RNA, 20 nt, synthetic construct
  source 1..20: mol_type = other RNA
aacaatgtatttgctttaaa

SEQ ID NO: 8761 - RNA, 20 nt, synthetic construct
  source 1..20: mol_type = other RNA
catgaaggaacttagcagca

SEQ ID NO: 8762 - RNA, 20 nt, synthetic construct
  source 1..20: mol_type = other RNA
tgaaggaacttagcagcaag

SEQ ID NO: 8763 - RNA, 20 nt, synthetic construct
  source 1..20: mol_type = other RNA
gcccatgaaggaacttagca

SEQ ID NO: 8764 - RNA, 20 nt, synthetic construct
  source 1..20: mol_type = other RNA
cccatgaaggaacttagcag

SEQ ID NO: 8765 - RNA, 20 nt, synthetic construct
  source 1..20: mol_type = other RNA
ccatgaaggaacttagcagc

SEQ ID NO: 8766 - RNA, 20 nt, synthetic construct
  source 1..20: mol_type = other RNA
atgaaggaacttagcagcaa

SEQ ID NO: 8767 - RNA, 20 nt, synthetic construct
  source 1..20: mol_type = other RNA
atcacagatttcaacattgc

SEQ ID NO: 8768 - RNA, 20 nt, synthetic construct
  source 1..20: mol_type = other RNA
cacagatttcaacattgctg

SEQ ID NO: 8769 - RNA, 20 nt, synthetic construct
  source 1..20: mol_type = other RNA
tcacagatttcaacattgct

SEQ ID NO: 8770 - RNA, 20 nt, synthetic construct
  source 1..20: mol_type = other RNA
acagatttcaacattgctgc

SEQ ID NO: 8771 - RNA, 20 nt, synthetic construct
  source 1..20: mol_type = other RNA
cagatttcaacattgctgcg

SEQ ID NO: 8772 - RNA, 20 nt, synthetic construct
  source 1..20: mol_type = other RNA
tctagggatatgaagcctga

SEQ ID NO: 8773 - RNA, 20 nt, synthetic construct
  source 1..20: mol_type = other RNA
ctagggatatgaagcctgac

SEQ ID NO: 8774 - RNA, 20 nt, synthetic construct
  source 1..20: mol_type = other RNA
tagggatatgaagcctgaca

SEQ ID NO: 8775 - RNA, 20 nt, synthetic construct
  source 1..20: mol_type = other RNA
agggatatgaagcctgacaa

SEQ ID NO: 8776 - RNA, 20 nt, synthetic construct
  source 1..20: mol_type = other RNA
gggatatgaagcctgacaat

SEQ ID NO: 8777 - RNA, 20 nt, synthetic construct
  source 1..20: mol_type = other RNA
cgcaatgaagtacatgaata

SEQ ID NO: 8778 - RNA, 20 nt, synthetic construct
  source 1..20: mol_type = other RNA
gcaatgaagtacatgaataa

SEQ ID NO: 8779 - RNA, 20 nt, synthetic construct
  source 1..20: mol_type = other RNA
caatgaagtacatgaataaa

SEQ ID NO: 8780 - RNA, 20 nt, synthetic construct
  source 1..20: mol_type = other RNA
aatgaagtacatgaataaac

SEQ ID NO: 8781 - RNA, 20 nt, synthetic construct
  source 1..20: mol_type = other RNA
atgaagtacatgaataaaca

SEQ ID NO: 8782 - RNA, 20 nt, synthetic construct
  source 1..20: mol_type = other RNA
tgaagtacatgaataaacaa

SEQ ID NO: 8783 - RNA, 20 nt, synthetic construct
  source 1..20: mol_type = other RNA
tacagacttcaacatagcga

SEQ ID NO: 8784 - RNA, 20 nt, synthetic construct
  source 1..20: mol_type = other RNA
acagacttcaacatagcgac

SEQ ID NO: 8785 - RNA, 20 nt, synthetic construct
  source 1..20: mol_type = other RNA
attacagacttcaacatagc

SEQ ID NO: 8786 - RNA, 20 nt, synthetic construct
  source 1..20: mol_type = other RNA
ttacagacttcaacatagcg

SEQ ID NO: 8787 - RNA, 20 nt, synthetic construct
  source 1..20: mol_type = other RNA
cagacttcaacatagcgacg

SEQ ID NO: 8788 - RNA, 20 nt, synthetic construct
  source 1..20: mol_type = other RNA
tacagagacatcaagccaga

SEQ ID NO: 8789 - RNA, 20 nt, synthetic construct
  source 1..20: mol_type = other RNA
acagagacatcaagccagac

SEQ ID NO: 8790 - RNA, 20 nt, synthetic construct
  source 1..20: mol_type = other RNA
cagagacatcaagccagaca

SEQ ID NO: 8791 - RNA, 20 nt, synthetic construct
  source 1..20: mol_type = other RNA
agagacatcaagccagacaa

SEQ ID NO: 8792 - RNA, 20 nt, synthetic construct
  source 1..20: mol_type = other RNA
gagacatcaagccagacaat

SEQ ID NO: 8793 - RNA, 20 nt, synthetic construct
  source 1..20: mol_type = other RNA
ccagacaatatcctgctgga

SEQ ID NO: 8794 - RNA, 20 nt, synthetic construct
  source 1..20: mol_type = other RNA
gccagacaatatcctgctgg

SEQ ID NO: 8795 - RNA, 20 nt, synthetic construct
  source 1..20: mol_type = other RNA
cagacaatatcctgctggat

SEQ ID NO: 8796 - RNA, 20 nt, synthetic construct
  source 1..20: mol_type = other RNA
agacaatatcctgctggatg

SEQ ID NO: 8797 - RNA, 20 nt, synthetic construct
  source 1..20: mol_type = other RNA
gacaatatcctgctggatga

SEQ ID NO: 8798 - RNA, 20 nt, synthetic construct
  source 1..20: mol_type = other RNA
acaatatcctgctggatgaa

SEQ ID NO: 8799 - RNA, 20 nt, synthetic construct
  source 1..20: mol_type = other RNA
tgcaatgaagtacatgaaca

SEQ ID NO: 8800 - RNA, 20 nt, synthetic construct
  source 1..20: mol_type = other RNA
aatgaagtacatgaacaagc

SEQ ID NO: 8801 - RNA, 20 nt, synthetic construct
  source 1..20: mol_type = other RNA
gcaatgaagtacatgaacaa

SEQ ID NO: 8802 - RNA, 20 nt, synthetic construct
  source 1..20: mol_type = other RNA
caatgaagtacatgaacaag

SEQ ID NO: 8803 - RNA, 20 nt, synthetic construct
  source 1..20: mol_type = other RNA
atgaagtacatgaacaagca

SEQ ID NO: 8804 - RNA, 20 nt, synthetic construct
  source 1..20: mol_type = other RNA
tgaagtacatgaacaagcag

SEQ ID NO: 8805 - RNA, 20 nt, synthetic construct
  source 1..20: mol_type = other RNA
ccgacttcaacattgccacc

SEQ ID NO: 8806 - RNA, 20 nt, synthetic construct
  source 1..20: mol_type = other RNA
accgacttcaacattgccac

SEQ ID NO: 8807 - RNA, 20 nt, synthetic construct
  source 1..20: mol_type = other RNA
gaccgacttcaacattgcca

SEQ ID NO: 8808 - RNA, 20 nt, synthetic construct
  source 1..20: mol_type = other RNA
tgaccgacttcaacattgcc

SEQ ID NO: 8809 - RNA, 20 nt, synthetic construct
  source 1..20: mol_type = other RNA
ctgaccgacttcaacattgc

SEQ ID NO: 8810 - RNA, 20 nt, synthetic construct
  source 1..20: mol_type = other RNA
gagatgtcaagcctgacaac

SEQ ID NO: 8811 - RNA, 20 nt, synthetic construct
  source 1..20: mol_type = other RNA
agagatgtcaagcctgacaa

SEQ ID NO: 8812 - RNA, 20 nt, synthetic construct
  source 1..20: mol_type = other RNA
tagagatgtcaagcctgaca

SEQ ID NO: 8813 - RNA, 20 nt, synthetic construct
  source 1..20: mol_type = other RNA
ctagagatgtcaagcctgac

SEQ ID NO: 8814 - RNA, 20 nt, synthetic construct
  source 1..20: mol_type = other RNA
tctagagatgtcaagcctga

SEQ ID NO: 8815 - RNA, 20 nt, synthetic construct
  source 1..20: mol_type = other RNA
acaacattctcctggatgag

SEQ ID NO: 8816 - RNA, 20 nt, synthetic construct
  source 1..20: mol_type = other RNA
tgacaacattctcctggatg

SEQ ID NO: 8817 - RNA, 20 nt, synthetic construct
  source 1..20: mol_type = other RNA
cctgacaacattctcctgga

SEQ ID NO: 8818 - RNA, 20 nt, synthetic construct
  source 1..20: mol_type = other RNA
gacaacattctcctggatga

SEQ ID NO: 8819 - RNA, 20 nt, synthetic construct
  source 1..20: mol_type = other RNA
ctgacaacattctcctggat

SEQ ID NO: 8820 - RNA, 20 nt, synthetic construct
  source 1..20: mol_type = other RNA
gcctgacaacattctcctgg

SEQ ID NO: 8821 - RNA, 20 nt, synthetic construct
  source 1..20: mol_type = other RNA
catgaagtacatgaacaagc

SEQ ID NO: 8822 - RNA, 20 nt, synthetic construct
  source 1..20: mol_type = other RNA
cgccatgaagtacatgaaca

SEQ ID NO: 8823 - RNA, 20 nt, synthetic construct
  source 1..20: mol_type = other RNA
ccatgaagtacatgaacaag

SEQ ID NO: 8824 - RNA, 20 nt, synthetic construct
  source 1..20: mol_type = other RNA
gccatgaagtacatgaacaa

SEQ ID NO: 8825 - RNA, 20 nt, synthetic construct
  source 1..20: mol_type = other RNA
gagatctgaaactggaaaat

SEQ ID NO: 8826 - RNA, 20 nt, synthetic construct
  source 1..20: mol_type = other RNA
agagatctgaaactggaaaa

SEQ ID NO: 8827 - RNA, 20 nt, synthetic construct
  source 1..20: mol_type = other RNA
tagagatctgaaactggaaa

SEQ ID NO: 8828 - RNA, 20 nt, synthetic construct
  source 1..20: mol_type = other RNA
atagagatctgaaactggaa

SEQ ID NO: 8829 - RNA, 20 nt, synthetic construct
  source 1..20: mol_type = other RNA
catagagatctgaaactgga

SEQ ID NO: 8830 - RNA, 20 nt, synthetic construct
  source 1..20: mol_type = other RNA
aaaatataatggttaaaagc

SEQ ID NO: 8831 - RNA, 20 nt, synthetic construct
  source 1..20: mol_type = other RNA
tggaaaatataatggttaaa

SEQ ID NO: 8832 - RNA, 20 nt, synthetic construct
  source 1..20: mol_type = other RNA
gaaaatataatggttaaaag

SEQ ID NO: 8833 - RNA, 20 nt, synthetic construct
  source 1..20: mol_type = other RNA
ggaaaatataatggttaaaa

SEQ ID NO: 8834 - RNA, 20 nt, synthetic construct
  source 1..20: mol_type = other RNA
ctggaaaatataatggttaa

SEQ ID NO: 8835 - RNA, 20 nt, synthetic construct
  source 1..20: mol_type = other RNA
actggaaaatataatggtta

SEQ ID NO: 8836 - RNA, 20 nt, synthetic construct
  source 1..20: mol_type = other RNA
ggccgactttggactaagca

SEQ ID NO: 8837 - RNA, 20 nt, synthetic construct
  source 1..20: mol_type = other RNA
gccgactttggactaagcaa

SEQ ID NO: 8838 - RNA, 20 nt, synthetic construct
  source 1..20: mol_type = other RNA
gtggccgactttggactaag

SEQ ID NO: 8839 - RNA, 20 nt, synthetic construct
  source 1..20: mol_type = other RNA
tggccgactttggactaagc

SEQ ID NO: 8840 - RNA, 20 nt, synthetic construct
  source 1..20: mol_type = other RNA
ccgactttggactaagcaag

SEQ ID NO: 8841 - RNA, 20 nt, synthetic construct
  source 1..20: mol_type = other RNA
cacagggacctgaagccaga

SEQ ID NO: 8842 - RNA, 20 nt, synthetic construct
  source 1..20: mol_type = other RNA
acagggacctgaagccagac

SEQ ID NO: 8843 - RNA, 20 nt, synthetic construct
  source 1..20: mol_type = other RNA
cagggacctgaagccagaca

SEQ ID NO: 8844 - RNA, 20 nt, synthetic construct
  source 1..20: mol_type = other RNA
agggacctgaagccagacaa

SEQ ID NO: 8845 - RNA, 20 nt, synthetic construct
  source 1..20: mol_type = other RNA
gggacctgaagccagacaac

SEQ ID NO: 8846 - RNA, 20 nt, synthetic construct
  source 1..20: mol_type = other RNA
ccagacaacatcctcatcac

SEQ ID NO: 8847 - RNA, 20 nt, synthetic construct
  source 1..20: mol_type = other RNA
agacaacatcctcatcacag

SEQ ID NO: 8848 - RNA, 20 nt, synthetic construct
  source 1..20: mol_type = other RNA
acaacatcctcatcacagag

SEQ ID NO: 8849 - RNA, 20 nt, synthetic construct
  source 1..20: mol_type = other RNA
gccagacaacatcctcatca

SEQ ID NO: 8850 - RNA, 20 nt, synthetic construct
  source 1..20: mol_type = other RNA
cagacaacatcctcatcaca

SEQ ID NO: 8851 - RNA, 20 nt, synthetic construct
  source 1..20: mol_type = other RNA
gacaacatcctcatcacaga

SEQ ID NO: 8852 - RNA, 20 nt, synthetic construct
  source 1..20: mol_type = other RNA
gcggtcaagaagatccgctg

SEQ ID NO: 8853 - RNA, 20 nt, synthetic construct
  source 1..20: mol_type = other RNA
gtcaagaagatccgctgcga

SEQ ID NO: 8854 - RNA, 20 nt, synthetic construct
  source 1..20: mol_type = other RNA
ggcggtcaagaagatccgct

SEQ ID NO: 8855 - RNA, 20 nt, synthetic construct
  source 1..20: mol_type = other RNA
cggtcaagaagatccgctgc

SEQ ID NO: 8856 - RNA, 20 nt, synthetic construct
  source 1..20: mol_type = other RNA
ggtcaagaagatccgctgcg

SEQ ID NO: 8857 - RNA, 20 nt, synthetic construct
  source 1..20: mol_type = other RNA
tcaagaagatccgctgcgac

SEQ ID NO: 8858 - RNA, 20 nt, synthetic construct
  source 1..20: mol_type = other RNA
gtgactttgggtaaagattc

SEQ ID NO: 8859 - RNA, 20 nt, synthetic construct
  source 1..20: mol_type = other RNA
ctctgtgactttgggtaaag

SEQ ID NO: 8860 - RNA, 20 nt, synthetic construct
  source 1..20: mol_type = other RNA
tctgtgactttgggtaaaga

SEQ ID NO: 8861 - RNA, 20 nt, synthetic construct
  source 1..20: mol_type = other RNA
ctgtgactttgggtaaagat

SEQ ID NO: 8862 - RNA, 20 nt, synthetic construct
  source 1..20: mol_type = other RNA
tgtgactttgggtaaagatt

SEQ ID NO: 8863 - RNA, 20 nt, synthetic construct
  source 1..20: mol_type = other RNA
caccgagatatgaagcctca

SEQ ID NO: 8864 - RNA, 20 nt, synthetic construct
  source 1..20: mol_type = other RNA
accgagatatgaagcctcag

SEQ ID NO: 8865 - RNA, 20 nt, synthetic construct
  source 1..20: mol_type = other RNA
ccgagatatgaagcctcaga

SEQ ID NO: 8866 - RNA, 20 nt, synthetic construct
  source 1..20: mol_type = other RNA
cgagatatgaagcctcagaa

SEQ ID NO: 8867 - RNA, 20 nt, synthetic construct
  source 1..20: mol_type = other RNA
gagatatgaagcctcagaac

SEQ ID NO: 8868 - RNA, 20 nt, synthetic construct
  source 1..20: mol_type = other RNA
tcagaacatcctcctcgcca

SEQ ID NO: 8869 - RNA, 20 nt, synthetic construct
  source 1..20: mol_type = other RNA
cagaacatcctcctcgccaa

SEQ ID NO: 8870 - RNA, 20 nt, synthetic construct
  source 1..20: mol_type = other RNA
agaacatcctcctcgccaag

SEQ ID NO: 8871 - RNA, 20 nt, synthetic construct
  source 1..20: mol_type = other RNA
gcctcagaacatcctcctcg

SEQ ID NO: 8872 - RNA, 20 nt, synthetic construct
  source 1..20: mol_type = other RNA
cctcagaacatcctcctcgc

SEQ ID NO: 8873 - RNA, 20 nt, synthetic construct
  source 1..20: mol_type = other RNA
ctcagaacatcctcctcgcc

SEQ ID NO: 8874 - RNA, 20 nt, synthetic construct
  source 1..20: mol_type = other RNA
cctgaagttcatcccaaaat

SEQ ID NO: 8875 - RNA, 20 nt, synthetic construct
  source 1..20: mol_type = other RNA
ctgaagttcatcccaaaatt

SEQ ID NO: 8876 - RNA, 20 nt, synthetic construct
  source 1..20: mol_type = other RNA
tgaagttcatcccaaaattg

SEQ ID NO: 8877 - RNA, 20 nt, synthetic construct
  source 1..20: mol_type = other RNA
ggccctgaagttcatcccaa

SEQ ID NO: 8878 - RNA, 20 nt, synthetic construct
  source 1..20: mol_type = other RNA
gccctgaagttcatcccaaa

SEQ ID NO: 8879 - RNA, 20 nt, synthetic construct
  source 1..20: mol_type = other RNA
ccctgaagttcatcccaaaa

SEQ ID NO: 8880 - RNA, 20 nt, synthetic construct
  source 1..20: mol_type = other RNA
ctgactttggtctttgcaca

SEQ ID NO: 8881 - RNA, 20 nt, synthetic construct
  source 1..20: mol_type = other RNA
tctgactttggtctttgcac

SEQ ID NO: 8882 - RNA, 20 nt, synthetic construct
  source 1..20: mol_type = other RNA
ttctgactttggtctttgca

SEQ ID NO: 8883 - RNA, 20 nt, synthetic construct
  source 1..20: mol_type = other RNA
tttctgactttggtctttgc

SEQ ID NO: 8884 - RNA, 20 nt, synthetic construct
  source 1..20: mol_type = other RNA
ctttctgactttggtctttg

SEQ ID NO: 8885 - RNA, 20 nt, synthetic construct
  source 1..20: mol_type = other RNA
gagacatcaaaccagacaac

SEQ ID NO: 8886 - RNA, 20 nt, synthetic construct
  source 1..20: mol_type = other RNA
agagacatcaaaccagacaa

SEQ ID NO: 8887 - RNA, 20 nt, synthetic construct
  source 1..20: mol_type = other RNA
cagagacatcaaaccagaca

SEQ ID NO: 8888 - RNA, 20 nt, synthetic construct
  source 1..20: mol_type = other RNA
acagagacatcaaaccagac

SEQ ID NO: 8889 - RNA, 20 nt, synthetic construct
  source 1..20: mol_type = other RNA
cacagagacatcaaaccaga

SEQ ID NO: 8890 - RNA, 20 nt, synthetic construct
  source 1..20: mol_type = other RNA
atgaaaatactccgtaaagc

SEQ ID NO: 8891 - RNA, 20 nt, synthetic construct
  source 1..20: mol_type = other RNA
gcaatgaaaatactccgtaa

SEQ ID NO: 8892 - RNA, 20 nt, synthetic construct
  source 1..20: mol_type = other RNA
gaaaatactccgtaaagcag

SEQ ID NO: 8893 - RNA, 20 nt, synthetic construct
  source 1..20: mol_type = other RNA
tgaaaatactccgtaaagca

SEQ ID NO: 8894 - RNA, 20 nt, synthetic construct
  source 1..20: mol_type = other RNA
aatgaaaatactccgtaaag

SEQ ID NO: 8895 - RNA, 20 nt, synthetic construct
  source 1..20: mol_type = other RNA
caatgaaaatactccgtaaa

SEQ ID NO: 8896 - RNA, 20 nt, synthetic construct
  source 1..20: mol_type = other RNA
tgcaatgaaaatactccgta

SEQ ID NO: 8897 - RNA, 20 nt, synthetic construct
  source 1..20: mol_type = other RNA
catcgggatattaagccaga

SEQ ID NO: 8898 - RNA, 20 nt, synthetic construct
  source 1..20: mol_type = other RNA
atcgggatattaagccagac

SEQ ID NO: 8899 - RNA, 20 nt, synthetic construct
  source 1..20: mol_type = other RNA
tcgggatattaagccagaca

SEQ ID NO: 8900 - RNA, 20 nt, synthetic construct
  source 1..20: mol_type = other RNA
cgggatattaagccagacaa

SEQ ID NO: 8901 - RNA, 20 nt, synthetic construct
  source 1..20: mol_type = other RNA
gggatattaagccagacaac

SEQ ID NO: 8902 - RNA, 20 nt, synthetic construct
  source 1..20: mol_type = other RNA
tgcaatgaagatattgagaa

SEQ ID NO: 8903 - RNA, 20 nt, synthetic construct
  source 1..20: mol_type = other RNA
atgaagatattgagaaagtc

SEQ ID NO: 8904 - RNA, 20 nt, synthetic construct
  source 1..20: mol_type = other RNA
gcaatgaagatattgagaaa

SEQ ID NO: 8905 - RNA, 20 nt, synthetic construct
  source 1..20: mol_type = other RNA
caatgaagatattgagaaag

SEQ ID NO: 8906 - RNA, 20 nt, synthetic construct
  source 1..20: mol_type = other RNA
aatgaagatattgagaaagt

SEQ ID NO: 8907 - RNA, 20 nt, synthetic construct
  source 1..20: mol_type = other RNA
tgaagatattgagaaagtct

SEQ ID NO: 8908 - RNA, 20 nt, synthetic construct
  source 1..20: mol_type = other RNA
gggatttgaaagctggtaat

SEQ ID NO: 8909 - RNA, 20 nt, synthetic construct
  source 1..20: mol_type = other RNA
agggatttgaaagctggtaa

SEQ ID NO: 8910 - RNA, 20 nt, synthetic construct
  source 1..20: mol_type = other RNA
tagggatttgaaagctggta

SEQ ID NO: 8911 - RNA, 20 nt, synthetic construct
  source 1..20: mol_type = other RNA
atagggatttgaaagctggt

SEQ ID NO: 8912 - RNA, 20 nt, synthetic construct
  source 1..20: mol_type = other RNA
aatagggatttgaaagctgg

SEQ ID NO: 8913 - RNA, 20 nt, synthetic construct
  source 1..20: mol_type = other RNA
ggtaatattcttctgggtga

SEQ ID NO: 8914 - RNA, 20 nt, synthetic construct
  source 1..20: mol_type = other RNA
tggtaatattcttctgggtg

SEQ ID NO: 8915 - RNA, 20 nt, synthetic construct
  source 1..20: mol_type = other RNA
gctggtaatattcttctggg

SEQ ID NO: 8916 - RNA, 20 nt, synthetic construct
  source 1..20: mol_type = other RNA
gtaatattcttctgggtgag

SEQ ID NO: 8917 - RNA, 20 nt, synthetic construct
  source 1..20: mol_type = other RNA
ctggtaatattcttctgggt

SEQ ID NO: 8918 - RNA, 20 nt, synthetic construct
  source 1..20: mol_type = other RNA
agctggtaatattcttctgg

SEQ ID NO: 8919 - RNA, 20 nt, synthetic construct
  source 1..20: mol_type = other RNA
gcaataaaacggatcaactt

SEQ ID NO: 8920 - RNA, 20 nt, synthetic construct
  source 1..20: mol_type = other RNA
agcaataaaacggatcaact

SEQ ID NO: 8921 - RNA, 20 nt, synthetic construct
  source 1..20: mol_type = other RNA
aaaacggatcaacttggaaa

SEQ ID NO: 8922 - RNA, 20 nt, synthetic construct
  source 1..20: mol_type = other RNA
taaaacggatcaacttggaa

SEQ ID NO: 8923 - RNA, 20 nt, synthetic construct
  source 1..20: mol_type = other RNA
ataaaacggatcaacttgga

SEQ ID NO: 8924 - RNA, 20 nt, synthetic construct
  source 1..20: mol_type = other RNA
aataaaacggatcaacttgg

SEQ ID NO: 8925 - RNA, 20 nt, synthetic construct
  source 1..20: mol_type = other RNA
caataaaacggatcaacttg

SEQ ID NO: 8926 - RNA, 20 nt, synthetic construct
  source 1..20: mol_type = other RNA
caccgagatatcaaggcagg

SEQ ID NO: 8927 - RNA, 20 nt, synthetic construct
  source 1..20: mol_type = other RNA
accgagatatcaaggcagga

SEQ ID NO: 8928 - RNA, 20 nt, synthetic construct
  source 1..20: mol_type = other RNA
ccgagatatcaaggcaggaa

SEQ ID NO: 8929 - RNA, 20 nt, synthetic construct
  source 1..20: mol_type = other RNA
cgagatatcaaggcaggaaa

SEQ ID NO: 8930 - RNA, 20 nt, synthetic construct
  source 1..20: mol_type = other RNA
gagatatcaaggcaggaaat

SEQ ID NO: 8931 - RNA, 20 nt, synthetic construct
  source 1..20: mol_type = other RNA
tgctattaagcaagttcctg

SEQ ID NO: 8932 - RNA, 20 nt, synthetic construct
  source 1..20: mol_type = other RNA
gctattaagcaagttcctgt

SEQ ID NO: 8933 - RNA, 20 nt, synthetic construct
  source 1..20: mol_type = other RNA
ctattaagcaagttcctgtg

SEQ ID NO: 8934 - RNA, 20 nt, synthetic construct
  source 1..20: mol_type = other RNA
tattaagcaagttcctgtgg

SEQ ID NO: 8935 - RNA, 20 nt, synthetic construct
  source 1..20: mol_type = other RNA
attaagcaagttcctgtgga

SEQ ID NO: 8936 - RNA, 20 nt, synthetic construct
  source 1..20: mol_type = other RNA
ttaagcaagttcctgtggaa

SEQ ID NO: 8937 - RNA, 20 nt, synthetic construct
  source 1..20: mol_type = other RNA
gagacctgaagctggggaac

SEQ ID NO: 8938 - RNA, 20 nt, synthetic construct
  source 1..20: mol_type = other RNA
agagacctgaagctggggaa

SEQ ID NO: 8939 - RNA, 20 nt, synthetic construct
  source 1..20: mol_type = other RNA
cagagacctgaagctgggga

SEQ ID NO: 8940 - RNA, 20 nt, synthetic construct
  source 1..20: mol_type = other RNA
acagagacctgaagctgggg

SEQ ID NO: 8941 - RNA, 20 nt, synthetic construct
  source 1..20: mol_type = other RNA
cacagagacctgaagctggg

SEQ ID NO: 8942 - RNA, 20 nt, synthetic construct
  source 1..20: mol_type = other RNA
ggaacatggtgctcaacaag

SEQ ID NO: 8943 - RNA, 20 nt, synthetic construct
  source 1..20: mol_type = other RNA
ggggaacatggtgctcaaca

SEQ ID NO: 8944 - RNA, 20 nt, synthetic construct
  source 1..20: mol_type = other RNA
gggaacatggtgctcaacaa

SEQ ID NO: 8945 - RNA, 20 nt, synthetic construct
  source 1..20: mol_type = other RNA
tggggaacatggtgctcaac

SEQ ID NO: 8946 - RNA, 20 nt, synthetic construct
  source 1..20: mol_type = other RNA
ctggggaacatggtgctcaa

SEQ ID NO: 8947 - RNA, 20 nt, synthetic construct
  source 1..20: mol_type = other RNA
gctggggaacatggtgctca

SEQ ID NO: 8948 - RNA, 20 nt, synthetic construct
  source 1..20: mol_type = other RNA
tgaaggtaagtgagacatgg

SEQ ID NO: 8949 - RNA, 20 nt, synthetic construct
  source 1..20: mol_type = other RNA
ctgaaggtaagtgagacatg

SEQ ID NO: 8950 - RNA, 20 nt, synthetic construct
  source 1..20: mol_type = other RNA
gctgaaggtaagtgagacat

SEQ ID NO: 8951 - RNA, 20 nt, synthetic construct
  source 1..20: mol_type = other RNA
agctgaaggtaagtgagaca

SEQ ID NO: 8952 - RNA, 20 nt, synthetic construct
  source 1..20: mol_type = other RNA
cagctgaaggtaagtgagac

SEQ ID NO: 8953 - RNA, 20 nt, synthetic construct
  source 1..20: mol_type = other RNA
tcagctgaaggtaagtgaga

SEQ ID NO: 8954 - RNA, 20 nt, synthetic construct
  source 1..20: mol_type = other RNA
ctgcaggacctgagttccaa

SEQ ID NO: 8955 - RNA, 20 nt, synthetic construct
  source 1..20: mol_type = other RNA
gcaggacctgagttccaatg

SEQ ID NO: 8956 - RNA, 20 nt, synthetic construct
  source 1..20: mol_type = other RNA
tgcaggacctgagttccaat

SEQ ID NO: 8957 - RNA, 20 nt, synthetic construct
  source 1..20: mol_type = other RNA
caggacctgagttccaatgt

SEQ ID NO: 8958 - RNA, 20 nt, synthetic construct
  source 1..20: mol_type = other RNA
aggacctgagttccaatgtg

SEQ ID NO: 8959 - RNA, 20 nt, synthetic construct
  source 1..20: mol_type = other RNA
cctccaacatcatcctcatc

SEQ ID NO: 8960 - RNA, 20 nt, synthetic construct
  source 1..20: mol_type = other RNA
ccaacatcatcctcatcagc

SEQ ID NO: 8961 - RNA, 20 nt, synthetic construct
  source 1..20: mol_type = other RNA
accctccaacatcatcctca

SEQ ID NO: 8962 - RNA, 20 nt, synthetic construct
  source 1..20: mol_type = other RNA
ccctccaacatcatcctcat

SEQ ID NO: 8963 - RNA, 20 nt, synthetic construct
  source 1..20: mol_type = other RNA
ctccaacatcatcctcatca

SEQ ID NO: 8964 - RNA, 20 nt, synthetic construct
  source 1..20: mol_type = other RNA
tccaacatcatcctcatcag

SEQ ID NO: 8965 - RNA, 20 nt, synthetic construct
  source 1..20: mol_type = other RNA
ataaagcaggtaagaggcca

SEQ ID NO: 8966 - RNA, 20 nt, synthetic construct
  source 1..20: mol_type = other RNA
tgtgataaagcaggtaagag

SEQ ID NO: 8967 - RNA, 20 nt, synthetic construct
  source 1..20: mol_type = other RNA
gtgataaagcaggtaagagg

SEQ ID NO: 8968 - RNA, 20 nt, synthetic construct
  source 1..20: mol_type = other RNA
tgataaagcaggtaagaggc

SEQ ID NO: 8969 - RNA, 20 nt, synthetic construct
  source 1..20: mol_type = other RNA
gataaagcaggtaagaggcc

SEQ ID NO: 8970 - RNA, 20 nt, synthetic construct
  source 1..20: mol_type = other RNA
taaagcaggtaagaggccaa

SEQ ID NO: 8971 - RNA, 20 nt, synthetic construct
  source 1..20: mol_type = other RNA
gggatgtggcagccaggaat

SEQ ID NO: 8972 - RNA, 20 nt, synthetic construct
  source 1..20: mol_type = other RNA
ggggatgtggcagccaggaa

SEQ ID NO: 8973 - RNA, 20 nt, synthetic construct
  source 1..20: mol_type = other RNA
tggggatgtggcagccagga

SEQ ID NO: 8974 - RNA, 20 nt, synthetic construct
  source 1..20: mol_type = other RNA
atggggatgtggcagccagg

SEQ ID NO: 8975 - RNA, 20 nt, synthetic construct
  source 1..20: mol_type = other RNA
catggggatgtggcagccag

SEQ ID NO: 8976 - RNA, 20 nt, synthetic construct
  source 1..20: mol_type = other RNA
aggaatattctgatgcaaag

SEQ ID NO: 8977 - RNA, 20 nt, synthetic construct
  source 1..20: mol_type = other RNA
ccaggaatattctgatgcaa

SEQ ID NO: 8978 - RNA, 20 nt, synthetic construct
  source 1..20: mol_type = other RNA
ggaatattctgatgcaaagt

SEQ ID NO: 8979 - RNA, 20 nt, synthetic construct
  source 1..20: mol_type = other RNA
caggaatattctgatgcaaa

SEQ ID NO: 8980 - RNA, 20 nt, synthetic construct
  source 1..20: mol_type = other RNA
gccaggaatattctgatgca

SEQ ID NO: 8981 - RNA, 20 nt, synthetic construct
  source 1..20: mol_type = other RNA
agccaggaatattctgatgc

SEQ ID NO: 8982 - RNA, 20 nt, synthetic construct
  source 1..20: mol_type = other RNA
tcaaggctttaaaaggtaaa

SEQ ID NO: 8983 - RNA, 20 nt, synthetic construct
  source 1..20: mol_type = other RNA
ctcaaggctttaaaaggtaa

SEQ ID NO: 8984 - RNA, 20 nt, synthetic construct
  source 1..20: mol_type = other RNA
tctcaaggctttaaaaggta

SEQ ID NO: 8985 - RNA, 20 nt, synthetic construct
  source 1..20: mol_type = other RNA
ttctcaaggctttaaaaggt

SEQ ID NO: 8986 - RNA, 20 nt, synthetic construct
  source 1..20: mol_type = other RNA
attctcaaggctttaaaagg

SEQ ID NO: 8987 - RNA, 20 nt, synthetic construct
  source 1..20: mol_type = other RNA
tattctcaaggctttaaaag

SEQ ID NO: 8988 - RNA, 20 nt, synthetic construct
  source 1..20: mol_type = other RNA
agtgatttcggactttccaa

SEQ ID NO: 8989 - RNA, 20 nt, synthetic construct
  source 1..20: mol_type = other RNA
atcagtgatttcggactttc

SEQ ID NO: 8990 - RNA, 20 nt, synthetic construct
  source 1..20: mol_type = other RNA
tcagtgatttcggactttcc

SEQ ID NO: 8991 - RNA, 20 nt, synthetic construct
  source 1..20: mol_type = other RNA
cagtgatttcggactttcca

SEQ ID NO: 8992 - RNA, 20 nt, synthetic construct
  source 1..20: mol_type = other RNA
gtgatttcggactttccaaa

SEQ ID NO: 8993 - RNA, 20 nt, synthetic construct
  source 1..20: mol_type = other RNA
agagatctggctgcaagaaa

SEQ ID NO: 8994 - RNA, 20 nt, synthetic construct
  source 1..20: mol_type = other RNA
cacagagatctggctgcaag

SEQ ID NO: 8995 - RNA, 20 nt, synthetic construct
  source 1..20: mol_type = other RNA
acagagatctggctgcaaga

SEQ ID NO: 8996 - RNA, 20 nt, synthetic construct
  source 1..20: mol_type = other RNA
cagagatctggctgcaagaa

SEQ ID NO: 8997 - RNA, 20 nt, synthetic construct
  source 1..20: mol_type = other RNA
gagatctggctgcaagaaat

SEQ ID NO: 8998 - RNA, 20 nt, synthetic construct
  source 1..20: mol_type = other RNA
tgcaagaaatgtgttgctag

SEQ ID NO: 8999 - RNA, 20 nt, synthetic construct
  source 1..20: mol_type = other RNA
gcaagaaatgtgttgctagt

SEQ ID NO: 9000 - RNA, 20 nt, synthetic construct
  source 1..20: mol_type = other RNA
caagaaatgtgttgctagtt

SEQ ID NO: 9001 - RNA, 20 nt, synthetic construct
  source 1..20: mol_type = other RNA
aagaaatgtgttgctagtta

SEQ ID NO: 9002 - RNA, 20 nt, synthetic construct
  source 1..20: mol_type = other RNA
agaaatgtgttgctagttac

SEQ ID NO: 9003 - RNA, 20 nt, synthetic construct
  source 1..20: mol_type = other RNA
gaaatgtgttgctagttacc

SEQ ID NO: 9004 - RNA, 20 nt, synthetic construct
  source 1..20: mol_type = other RNA
ggctgtgaaaatactgaaaa

SEQ ID NO: 9005 - RNA, 20 nt, synthetic construct
  source 1..20: mol_type = other RNA
cttgctgactttggctctgc

SEQ ID NO: 9006 - RNA, 20 nt, synthetic construct
  source 1..20: mol_type = other RNA
ttgctgactttggctctgct

SEQ ID NO: 9007 - RNA, 20 nt, synthetic construct
  source 1..20: mol_type = other RNA
tgctgactttggctctgctt

SEQ ID NO: 9008 - RNA, 20 nt, synthetic construct
  source 1..20: mol_type = other RNA
gctgactttggctctgcttc

SEQ ID NO: 9009 - RNA, 20 nt, synthetic construct
  source 1..20: mol_type = other RNA
ctgactttggctctgcttcc

SEQ ID NO: 9010 - RNA, 20 nt, synthetic construct
  source 1..20: mol_type = other RNA
cctagagatatcaaagcagg

SEQ ID NO: 9011 - RNA, 20 nt, synthetic construct
  source 1..20: mol_type = other RNA
ctagagatatcaaagcagga

SEQ ID NO: 9012 - RNA, 20 nt, synthetic construct
  source 1..20: mol_type = other RNA
tagagatatcaaagcaggaa

SEQ ID NO: 9013 - RNA, 20 nt, synthetic construct
  source 1..20: mol_type = other RNA
agagatatcaaagcaggaaa

SEQ ID NO: 9014 - RNA, 20 nt, synthetic construct
  source 1..20: mol_type = other RNA
gagatatcaaagcaggaaat

SEQ ID NO: 9015 - RNA, 20 nt, synthetic construct
  source 1..20: mol_type = other RNA
gcaggaaatatccttctgac

SEQ ID NO: 9016 - RNA, 20 nt, synthetic construct
  source 1..20: mol_type = other RNA
agcaggaaatatccttctga

SEQ ID NO: 9017 - RNA, 20 nt, synthetic construct
  source 1..20: mol_type = other RNA
caggaaatatccttctgaca

SEQ ID NO: 9018 - RNA, 20 nt, synthetic construct
  source 1..20: mol_type = other RNA
aggaaatatccttctgacag

SEQ ID NO: 9019 - RNA, 20 nt, synthetic construct
  source 1..20: mol_type = other RNA
ggaaatatccttctgacaga

SEQ ID NO: 9020 - RNA, 20 nt, synthetic construct
  source 1..20: mol_type = other RNA
gaaatatccttctgacagaa

SEQ ID NO: 9021 - RNA, 20 nt, synthetic construct
  source 1..20: mol_type = other RNA
ccatcaagaaaatgtcttat

SEQ ID NO: 9022 - RNA, 20 nt, synthetic construct
  source 1..20: mol_type = other RNA
atcaagaaaatgtcttatag

SEQ ID NO: 9023 - RNA, 20 nt, synthetic construct
  source 1..20: mol_type = other RNA
tcaagaaaatgtcttatagt

SEQ ID NO: 9024 - RNA, 20 nt, synthetic construct
  source 1..20: mol_type = other RNA
ggccatcaagaaaatgtctt

SEQ ID NO: 9025 - RNA, 20 nt, synthetic construct
  source 1..20: mol_type = other RNA
gccatcaagaaaatgtctta

SEQ ID NO: 9026 - RNA, 20 nt, synthetic construct
  source 1..20: mol_type = other RNA
catcaagaaaatgtcttata

SEQ ID NO: 9027 - RNA, 20 nt, synthetic construct
  source 1..20: mol_type = other RNA
ctaggggactttggttctgc

SEQ ID NO: 9028 - RNA, 20 nt, synthetic construct
  source 1..20: mol_type = other RNA
taggggactttggttctgcg

SEQ ID NO: 9029 - RNA, 20 nt, synthetic construct
  source 1..20: mol_type = other RNA
aggggactttggttctgcgt

SEQ ID NO: 9030 - RNA, 20 nt, synthetic construct
  source 1..20: mol_type = other RNA
ggggactttggttctgcgtc

SEQ ID NO: 9031 - RNA, 20 nt, synthetic construct
  source 1..20: mol_type = other RNA
gggactttggttctgcgtcc

SEQ ID NO: 9032 - RNA, 20 nt, synthetic construct
  source 1..20: mol_type = other RNA
ggcagggatgtgaaggctgg

SEQ ID NO: 9033 - RNA, 20 nt, synthetic construct
  source 1..20: mol_type = other RNA
gcagggatgtgaaggctgga

SEQ ID NO: 9034 - RNA, 20 nt, synthetic construct
  source 1..20: mol_type = other RNA
cagggatgtgaaggctggaa

SEQ ID NO: 9035 - RNA, 20 nt, synthetic construct
  source 1..20: mol_type = other RNA
agggatgtgaaggctggaaa

SEQ ID NO: 9036 - RNA, 20 nt, synthetic construct
  source 1..20: mol_type = other RNA
gggatgtgaaggctggaaac

SEQ ID NO: 9037 - RNA, 20 nt, synthetic construct
  source 1..20: mol_type = other RNA
gctggaaacatcctgctgtc

SEQ ID NO: 9038 - RNA, 20 nt, synthetic construct
  source 1..20: mol_type = other RNA
tggaaacatcctgctgtcag

SEQ ID NO: 9039 - RNA, 20 nt, synthetic construct
  source 1..20: mol_type = other RNA
ggctggaaacatcctgctgt

SEQ ID NO: 9040 - RNA, 20 nt, synthetic construct
  source 1..20: mol_type = other RNA
ctggaaacatcctgctgtca

SEQ ID NO: 9041 - RNA, 20 nt, synthetic construct
  source 1..20: mol_type = other RNA
ggaaacatcctgctgtcaga

SEQ ID NO: 9042 - RNA, 20 nt, synthetic construct
  source 1..20: mol_type = other RNA
gaaacatcctgctgtcagag

SEQ ID NO: 9043 - RNA, 20 nt, synthetic construct
  source 1..20: mol_type = other RNA
ccatcaagaagatgtcctac

SEQ ID NO: 9044 - RNA, 20 nt, synthetic construct
  source 1..20: mol_type = other RNA
atcaagaagatgtcctacag

SEQ ID NO: 9045 - RNA, 20 nt, synthetic construct
  source 1..20: mol_type = other RNA
tcaagaagatgtcctacagt

SEQ ID NO: 9046 - RNA, 20 nt, synthetic construct
  source 1..20: mol_type = other RNA
ggccatcaagaagatgtcct

SEQ ID NO: 9047 - RNA, 20 nt, synthetic construct
  source 1..20: mol_type = other RNA
gccatcaagaagatgtccta

SEQ ID NO: 9048 - RNA, 20 nt, synthetic construct
  source 1..20: mol_type = other RNA
catcaagaagatgtcctaca

SEQ ID NO: 9049 - RNA, 20 nt, synthetic construct
  source 1..20: mol_type = other RNA
gggatattaaagcaggaaat

SEQ ID NO: 9050 - RNA, 20 nt, synthetic construct
  source 1..20: mol_type = other RNA
agggatattaaagcaggaaa

SEQ ID NO: 9051 - RNA, 20 nt, synthetic construct
  source 1..20: mol_type = other RNA
tagggatattaaagcaggaa

SEQ ID NO: 9052 - RNA, 20 nt, synthetic construct
  source 1..20: mol_type = other RNA
atagggatattaaagcagga

SEQ ID NO: 9053 - RNA, 20 nt, synthetic construct
  source 1..20: mol_type = other RNA
tatagggatattaaagcagg

SEQ ID NO: 9054 - RNA, 20 nt, synthetic construct
  source 1..20: mol_type = other RNA
aggaaatattcttctaacag

SEQ ID NO: 9055 - RNA, 20 nt, synthetic construct
  source 1..20: mol_type = other RNA
gcaggaaatattcttctaac

SEQ ID NO: 9056 - RNA, 20 nt, synthetic construct
  source 1..20: mol_type = other RNA
gaaatattcttctaacagag

SEQ ID NO: 9057 - RNA, 20 nt, synthetic construct
  source 1..20: mol_type = other RNA
ggaaatattcttctaacaga

SEQ ID NO: 9058 - RNA, 20 nt, synthetic construct
  source 1..20: mol_type = other RNA
caggaaatattcttctaaca

SEQ ID NO: 9059 - RNA, 20 nt, synthetic construct
  source 1..20: mol_type = other RNA
agcaggaaatattcttctaa

SEQ ID NO: 9060 - RNA, 20 nt, synthetic construct
  source 1..20: mol_type = other RNA
ttaagaagatgtcctatagt

SEQ ID NO: 9061 - RNA, 20 nt, synthetic construct
  source 1..20: mol_type = other RNA
attaagaagatgtcctatag

SEQ ID NO: 9062 - RNA, 20 nt, synthetic construct
  source 1..20: mol_type = other RNA
caattaagaagatgtcctat

SEQ ID NO: 9063 - RNA, 20 nt, synthetic construct
  source 1..20: mol_type = other RNA
aattaagaagatgtcctata

SEQ ID NO: 9064 - RNA, 20 nt, synthetic construct
  source 1..20: mol_type = other RNA
gcaattaagaagatgtccta

SEQ ID NO: 9065 - RNA, 20 nt, synthetic construct
  source 1..20: mol_type = other RNA
ggcaattaagaagatgtcct

SEQ ID NO: 9066 - RNA, 20 nt, synthetic construct
  source 1..20: mol_type = other RNA
ctcataatatcctgttggac

SEQ ID NO: 9067 - RNA, 20 nt, synthetic construct
  source 1..20: mol_type = other RNA
ataatatcctgttggaccga

SEQ ID NO: 9068 - RNA, 20 nt, synthetic construct
  source 1..20: mol_type = other RNA
cataatatcctgttggaccg

SEQ ID NO: 9069 - RNA, 20 nt, synthetic construct
  source 1..20: mol_type = other RNA
tcataatatcctgttggacc

SEQ ID NO: 9070 - RNA, 20 nt, synthetic construct
  source 1..20: mol_type = other RNA
cctcataatatcctgttgga

SEQ ID NO: 9071 - RNA, 20 nt, synthetic construct
  source 1..20: mol_type = other RNA
tcctcataatatcctgttgg

SEQ ID NO: 9072 - RNA, 20 nt, synthetic construct
  source 1..20: mol_type = other RNA
caccgtgatatcaagccagg

SEQ ID NO: 9073 - RNA, 20 nt, synthetic construct
  source 1..20: mol_type = other RNA
accgtgatatcaagccagga

SEQ ID NO: 9074 - RNA, 20 nt, synthetic construct
  source 1..20: mol_type = other RNA
ccgtgatatcaagccaggaa

SEQ ID NO: 9075 - RNA, 20 nt, synthetic construct
  source 1..20: mol_type = other RNA
cgtgatatcaagccaggaaa

SEQ ID NO: 9076 - RNA, 20 nt, synthetic construct
  source 1..20: mol_type = other RNA
gtgatatcaagccaggaaat

SEQ ID NO: 9077 - RNA, 20 nt, synthetic construct
  source 1..20: mol_type = other RNA
ggaaatatcatgcgtgttat

SEQ ID NO: 9078 - RNA, 20 nt, synthetic construct
  source 1..20: mol_type = other RNA
gaaatatcatgcgtgttata

SEQ ID NO: 9079 - RNA, 20 nt, synthetic construct
  source 1..20: mol_type = other RNA
gccaggaaatatcatgcgtg

SEQ ID NO: 9080 - RNA, 20 nt, synthetic construct
  source 1..20: mol_type = other RNA
ccaggaaatatcatgcgtgt

SEQ ID NO: 9081 - RNA, 20 nt, synthetic construct
  source 1..20: mol_type = other RNA
caggaaatatcatgcgtgtt

SEQ ID NO: 9082 - RNA, 20 nt, synthetic construct
  source 1..20: mol_type = other RNA
aggaaatatcatgcgtgtta

SEQ ID NO: 9083 - RNA, 20 nt, synthetic construct
  source 1..20: mol_type = other RNA
tcaaagtatttaataacata

SEQ ID NO: 9084 - RNA, 20 nt, synthetic construct
  source 1..20: mol_type = other RNA
tgctatcaaagtatttaata

SEQ ID NO: 9085 - RNA, 20 nt, synthetic construct
  source 1..20: mol_type = other RNA
gctatcaaagtatttaataa

SEQ ID NO: 9086 - RNA, 20 nt, synthetic construct
  source 1..20: mol_type = other RNA
ctatcaaagtatttaataac

SEQ ID NO: 9087 - RNA, 20 nt, synthetic construct
  source 1..20: mol_type = other RNA
tatcaaagtatttaataaca

SEQ ID NO: 9088 - RNA, 20 nt, synthetic construct
  source 1..20: mol_type = other RNA
atcaaagtatttaataacat

SEQ ID NO: 9089 - RNA, 20 nt, synthetic construct
  source 1..20: mol_type = other RNA
caaagtatttaataacataa

SEQ ID NO: 9090 - RNA, 20 nt, synthetic construct
  source 1..20: mol_type = other RNA
cacagagatctggtaaccct

SEQ ID NO: 9091 - RNA, 20 nt, synthetic construct
  source 1..20: mol_type = other RNA
gagatctggtaaccctagcc

SEQ ID NO: 9092 - RNA, 20 nt, synthetic construct
  source 1..20: mol_type = other RNA
agagatctggtaaccctagc

SEQ ID NO: 9093 - RNA, 20 nt, synthetic construct
  source 1..20: mol_type = other RNA
cagagatctggtaaccctag

SEQ ID NO: 9094 - RNA, 20 nt, synthetic construct
  source 1..20: mol_type = other RNA
acagagatctggtaacccta

SEQ ID NO: 9095 - RNA, 20 nt, synthetic construct
  source 1..20: mol_type = other RNA
agaaattgtctagtaagtga

SEQ ID NO: 9096 - RNA, 20 nt, synthetic construct
  source 1..20: mol_type = other RNA
cagaaattgtctagtaagtg

SEQ ID NO: 9097 - RNA, 20 nt, synthetic construct
  source 1..20: mol_type = other RNA
gccagaaattgtctagtaag

SEQ ID NO: 9098 - RNA, 20 nt, synthetic construct
  source 1..20: mol_type = other RNA
gaaattgtctagtaagtgag

SEQ ID NO: 9099 - RNA, 20 nt, synthetic construct
  source 1..20: mol_type = other RNA
ccagaaattgtctagtaagt

SEQ ID NO: 9100 - RNA, 20 nt, synthetic construct
  source 1..20: mol_type = other RNA
tgccagaaattgtctagtaa

SEQ ID NO: 9101 - RNA, 20 nt, synthetic construct
  source 1..20: mol_type = other RNA
atcaaagctattcgggaagg

SEQ ID NO: 9102 - RNA, 20 nt, synthetic construct
  source 1..20: mol_type = other RNA
caatcaaagctattcgggaa

SEQ ID NO: 9103 - RNA, 20 nt, synthetic construct
  source 1..20: mol_type = other RNA
gcaatcaaagctattcggga

SEQ ID NO: 9104 - RNA, 20 nt, synthetic construct
  source 1..20: mol_type = other RNA
caaagctattcgggaaggtg

SEQ ID NO: 9105 - RNA, 20 nt, synthetic construct
  source 1..20: mol_type = other RNA
tcaaagctattcgggaaggt

SEQ ID NO: 9106 - RNA, 20 nt, synthetic construct
  source 1..20: mol_type = other RNA
aatcaaagctattcgggaag

SEQ ID NO: 9107 - RNA, 20 nt, synthetic construct
  source 1..20: mol_type = other RNA
cgcaatcaaagctattcggg

SEQ ID NO: 9108 - RNA, 20 nt, synthetic construct
  source 1..20: mol_type = other RNA
cacagggatctggctgccag

SEQ ID NO: 9109 - RNA, 20 nt, synthetic construct
  source 1..20: mol_type = other RNA
acagggatctggctgccaga

SEQ ID NO: 9110 - RNA, 20 nt, synthetic construct
  source 1..20: mol_type = other RNA
cagggatctggctgccagaa

SEQ ID NO: 9111 - RNA, 20 nt, synthetic construct
  source 1..20: mol_type = other RNA
agggatctggctgccagaaa

SEQ ID NO: 9112 - RNA, 20 nt, synthetic construct
  source 1..20: mol_type = other RNA
gggatctggctgccagaaac

SEQ ID NO: 9113 - RNA, 20 nt, synthetic construct
  source 1..20: mol_type = other RNA
catcaaaagaatgaaaggtc

SEQ ID NO: 9114 - RNA, 20 nt, synthetic construct
  source 1..20: mol_type = other RNA
tcaaaagaatgaaaggtcag

SEQ ID NO: 9115 - RNA, 20 nt, synthetic construct
  source 1..20: mol_type = other RNA
caaaagaatgaaaggtcagt

SEQ ID NO: 9116 - RNA, 20 nt, synthetic construct
  source 1..20: mol_type = other RNA
tgccatcaaaagaatgaaag

SEQ ID NO: 9117 - RNA, 20 nt, synthetic construct
  source 1..20: mol_type = other RNA
gccatcaaaagaatgaaagg

SEQ ID NO: 9118 - RNA, 20 nt, synthetic construct
  source 1..20: mol_type = other RNA
ccatcaaaagaatgaaaggt

SEQ ID NO: 9119 - RNA, 20 nt, synthetic construct
  source 1..20: mol_type = other RNA
atcaaaagaatgaaaggtca

SEQ ID NO: 9120 - RNA, 20 nt, synthetic construct
  source 1..20: mol_type = other RNA
tgggtgacttcgggctggcc

SEQ ID NO: 9121 - RNA, 20 nt, synthetic construct
  source 1..20: mol_type = other RNA
gggtgacttcgggctggccg

SEQ ID NO: 9122 - RNA, 20 nt, synthetic construct
  source 1..20: mol_type = other RNA
ggtgacttcgggctggccga

SEQ ID NO: 9123 - RNA, 20 nt, synthetic construct
  source 1..20: mol_type = other RNA
gtgacttcgggctggccgaa

SEQ ID NO: 9124 - RNA, 20 nt, synthetic construct
  source 1..20: mol_type = other RNA
gtgggtgacttcgggctggc

SEQ ID NO: 9125 - RNA, 20 nt, synthetic construct
  source 1..20: mol_type = other RNA
caccgcgacctcacatccaa

SEQ ID NO: 9126 - RNA, 20 nt, synthetic construct
  source 1..20: mol_type = other RNA
cgcgacctcacatccaaggt

SEQ ID NO: 9127 - RNA, 20 nt, synthetic construct
  source 1..20: mol_type = other RNA
gcgacctcacatccaaggta

SEQ ID NO: 9128 - RNA, 20 nt, synthetic construct
  source 1..20: mol_type = other RNA
accgcgacctcacatccaag

SEQ ID NO: 9129 - RNA, 20 nt, synthetic construct
  source 1..20: mol_type = other RNA
ccgcgacctcacatccaagg

SEQ ID NO: 9130 - RNA, 20 nt, synthetic construct
  source 1..20: mol_type = other RNA
gtcagaactgtctagtccga

SEQ ID NO: 9131 - RNA, 20 nt, synthetic construct
  source 1..20: mol_type = other RNA
tcagaactgtctagtccgac

SEQ ID NO: 9132 - RNA, 20 nt, synthetic construct
  source 1..20: mol_type = other RNA
cagaactgtctagtccgacg

SEQ ID NO: 9133 - RNA, 20 nt, synthetic construct
  source 1..20: mol_type = other RNA
gtgtcagaactgtctagtcc

SEQ ID NO: 9134 - RNA, 20 nt, synthetic construct
  source 1..20: mol_type = other RNA
tgtcagaactgtctagtccg

SEQ ID NO: 9135 - RNA, 20 nt, synthetic construct
  source 1..20: mol_type = other RNA
agaactgtctagtccgacgg

SEQ ID NO: 9136 - RNA, 20 nt, synthetic construct
  source 1..20: mol_type = other RNA
tgaagatgaacaagctcccc

SEQ ID NO: 9137 - RNA, 20 nt, synthetic construct
  source 1..20: mol_type = other RNA
ggtgctgaagatgaacaagc

SEQ ID NO: 9138 - RNA, 20 nt, synthetic construct
  source 1..20: mol_type = other RNA
gtgctgaagatgaacaagct

SEQ ID NO: 9139 - RNA, 20 nt, synthetic construct
  source 1..20: mol_type = other RNA
tgctgaagatgaacaagctc

SEQ ID NO: 9140 - RNA, 20 nt, synthetic construct
  source 1..20: mol_type = other RNA
gctgaagatgaacaagctcc

SEQ ID NO: 9141 - RNA, 20 nt, synthetic construct
  source 1..20: mol_type = other RNA
ctgaagatgaacaagctccc

SEQ ID NO: 9142 - RNA, 20 nt, synthetic construct
  source 1..20: mol_type = other RNA
agctgactttggcctggctg

SEQ ID NO: 9143 - RNA, 20 nt, synthetic construct
  source 1..20: mol_type = other RNA
ctgactttggcctggctgag

SEQ ID NO: 9144 - RNA, 20 nt, synthetic construct
  source 1..20: mol_type = other RNA
gctgactttggcctggctga

SEQ ID NO: 9145 - RNA, 20 nt, synthetic construct
  source 1..20: mol_type = other RNA
tagctgactttggcctggct

SEQ ID NO: 9146 - RNA, 20 nt, synthetic construct
  source 1..20: mol_type = other RNA
gtagctgactttggcctggc

SEQ ID NO: 9147 - RNA, 20 nt, synthetic construct
  source 1..20: mol_type = other RNA
gggacctcacatctaaggta

SEQ ID NO: 9148 - RNA, 20 nt, synthetic construct
  source 1..20: mol_type = other RNA
catcgggacctcacatctaa

SEQ ID NO: 9149 - RNA, 20 nt, synthetic construct
  source 1..20: mol_type = other RNA
cgggacctcacatctaaggt

SEQ ID NO: 9150 - RNA, 20 nt, synthetic construct
  source 1..20: mol_type = other RNA
tcgggacctcacatctaagg

SEQ ID NO: 9151 - RNA, 20 nt, synthetic construct
  source 1..20: mol_type = other RNA
atcgggacctcacatctaag

SEQ ID NO: 9152 - RNA, 20 nt, synthetic construct
  source 1..20: mol_type = other RNA
tagaactgcctgataaagag

SEQ ID NO: 9153 - RNA, 20 nt, synthetic construct
  source 1..20: mol_type = other RNA
ctagaactgcctgataaaga

SEQ ID NO: 9154 - RNA, 20 nt, synthetic construct
  source 1..20: mol_type = other RNA
cctagaactgcctgataaag

SEQ ID NO: 9155 - RNA, 20 nt, synthetic construct
  source 1..20: mol_type = other RNA
accctagaactgcctgataa

SEQ ID NO: 9156 - RNA, 20 nt, synthetic construct
  source 1..20: mol_type = other RNA
agaactgcctgataaagagg

SEQ ID NO: 9157 - RNA, 20 nt, synthetic construct
  source 1..20: mol_type = other RNA
ccctagaactgcctgataaa

SEQ ID NO: 9158 - RNA, 20 nt, synthetic construct
  source 1..20: mol_type = other RNA
ttaagatgaacacattgagc

SEQ ID NO: 9159 - RNA, 20 nt, synthetic construct
  source 1..20: mol_type = other RNA
ctcttaagatgaacacattg

SEQ ID NO: 9160 - RNA, 20 nt, synthetic construct
  source 1..20: mol_type = other RNA
ggctcttaagatgaacacat

SEQ ID NO: 9161 - RNA, 20 nt, synthetic construct
  source 1..20: mol_type = other RNA
cttaagatgaacacattgag

SEQ ID NO: 9162 - RNA, 20 nt, synthetic construct
  source 1..20: mol_type = other RNA
tcttaagatgaacacattga

SEQ ID NO: 9163 - RNA, 20 nt, synthetic construct
  source 1..20: mol_type = other RNA
gctcttaagatgaacacatt

SEQ ID NO: 9164 - RNA, 20 nt, synthetic construct
  source 1..20: mol_type = other RNA
gaaagagctgaatctcccca

SEQ ID NO: 9165 - RNA, 20 nt, synthetic construct
  source 1..20: mol_type = other RNA
tgaaagagctgaatctcccc

SEQ ID NO: 9166 - RNA, 20 nt, synthetic construct
  source 1..20: mol_type = other RNA
gtgaaagagctgaatctccc

SEQ ID NO: 9167 - RNA, 20 nt, synthetic construct
  source 1..20: mol_type = other RNA
agtgaaagagctgaatctcc

SEQ ID NO: 9168 - RNA, 20 nt, synthetic construct
  source 1..20: mol_type = other RNA
cagtgaaagagctgaatctc

SEQ ID NO: 9169 - RNA, 20 nt, synthetic construct
  source 1..20: mol_type = other RNA
acagtgaaagagctgaatct

SEQ ID NO: 9170 - RNA, 20 nt, synthetic construct
  source 1..20: mol_type = other RNA
cacagtgaaagagctgaatc

SEQ ID NO: 9171 - RNA, 20 nt, synthetic construct
  source 1..20: mol_type = other RNA
attgcagacttaggactggc

SEQ ID NO: 9172 - RNA, 20 nt, synthetic construct
  source 1..20: mol_type = other RNA
cagacttaggactggcagta

SEQ ID NO: 9173 - RNA, 20 nt, synthetic construct
  source 1..20: mol_type = other RNA
ttgcagacttaggactggca

SEQ ID NO: 9174 - RNA, 20 nt, synthetic construct
  source 1..20: mol_type = other RNA
tgcagacttaggactggcag

SEQ ID NO: 9175 - RNA, 20 nt, synthetic construct
  source 1..20: mol_type = other RNA
gcagacttaggactggcagt

SEQ ID NO: 9176 - RNA, 20 nt, synthetic construct
  source 1..20: mol_type = other RNA
catagagatttgaaatcaaa

SEQ ID NO: 9177 - RNA, 20 nt, synthetic construct
  source 1..20: mol_type = other RNA
atagagatttgaaatcaaag

SEQ ID NO: 9178 - RNA, 20 nt, synthetic construct
  source 1..20: mol_type = other RNA
tagagatttgaaatcaaaga

SEQ ID NO: 9179 - RNA, 20 nt, synthetic construct
  source 1..20: mol_type = other RNA
agagatttgaaatcaaagaa

SEQ ID NO: 9180 - RNA, 20 nt, synthetic construct
  source 1..20: mol_type = other RNA
gagatttgaaatcaaagaat

SEQ ID NO: 9181 - RNA, 20 nt, synthetic construct
  source 1..20: mol_type = other RNA
atcaaagaatatcttggtaa

SEQ ID NO: 9182 - RNA, 20 nt, synthetic construct
  source 1..20: mol_type = other RNA
aaagaatatcttggtaaaga

SEQ ID NO: 9183 - RNA, 20 nt, synthetic construct
  source 1..20: mol_type = other RNA
tcaaagaatatcttggtaaa

SEQ ID NO: 9184 - RNA, 20 nt, synthetic construct
  source 1..20: mol_type = other RNA
caaagaatatcttggtaaag

SEQ ID NO: 9185 - RNA, 20 nt, synthetic construct
  source 1..20: mol_type = other RNA
aagaatatcttggtaaagaa

SEQ ID NO: 9186 - RNA, 20 nt, synthetic construct
  source 1..20: mol_type = other RNA
agaatatcttggtaaagaag

SEQ ID NO: 9187 - RNA, 20 nt, synthetic construct
  source 1..20: mol_type = other RNA
ctgttaagatattctcctct

SEQ ID NO: 9188 - RNA, 20 nt, synthetic construct
  source 1..20: mol_type = other RNA
gttaagatattctcctctag

SEQ ID NO: 9189 - RNA, 20 nt, synthetic construct
  source 1..20: mol_type = other RNA
tgctgttaagatattctcct

SEQ ID NO: 9190 - RNA, 20 nt, synthetic construct
  source 1..20: mol_type = other RNA
gctgttaagatattctcctc

SEQ ID NO: 9191 - RNA, 20 nt, synthetic construct
  source 1..20: mol_type = other RNA
tgttaagatattctcctcta

SEQ ID NO: 9192 - RNA, 20 nt, synthetic construct
  source 1..20: mol_type = other RNA
ttaagatattctcctctaga

SEQ ID NO: 9193 - RNA, 20 nt, synthetic construct
  source 1..20: mol_type = other RNA
gtgtgactttgggctttccc

SEQ ID NO: 9194 - RNA, 20 nt, synthetic construct
  source 1..20: mol_type = other RNA
gtgactttgggctttccctg

SEQ ID NO: 9195 - RNA, 20 nt, synthetic construct
  source 1..20: mol_type = other RNA
ctgtgtgactttgggctttc

SEQ ID NO: 9196 - RNA, 20 nt, synthetic construct
  source 1..20: mol_type = other RNA
tgtgtgactttgggctttcc

SEQ ID NO: 9197 - RNA, 20 nt, synthetic construct
  source 1..20: mol_type = other RNA
tgtgactttgggctttccct

SEQ ID NO: 9198 - RNA, 20 nt, synthetic construct
  source 1..20: mol_type = other RNA
cacagggacctcaagagctc

SEQ ID NO: 9199 - RNA, 20 nt, synthetic construct
  source 1..20: mol_type = other RNA
acagggacctcaagagctcc

SEQ ID NO: 9200 - RNA, 20 nt, synthetic construct
  source 1..20: mol_type = other RNA
cagggacctcaagagctcca

SEQ ID NO: 9201 - RNA, 20 nt, synthetic construct
  source 1..20: mol_type = other RNA
agggacctcaagagctccaa

SEQ ID NO: 9202 - RNA, 20 nt, synthetic construct
  source 1..20: mol_type = other RNA
gggacctcaagagctccaat

SEQ ID NO: 9203 - RNA, 20 nt, synthetic construct
  source 1..20: mol_type = other RNA
gagctccaatatcctcgtga

SEQ ID NO: 9204 - RNA, 20 nt, synthetic construct
  source 1..20: mol_type = other RNA
tccaatatcctcgtgaagaa

SEQ ID NO: 9205 - RNA, 20 nt, synthetic construct
  source 1..20: mol_type = other RNA
agctccaatatcctcgtgaa

SEQ ID NO: 9206 - RNA, 20 nt, synthetic construct
  source 1..20: mol_type = other RNA
gctccaatatcctcgtgaag

SEQ ID NO: 9207 - RNA, 20 nt, synthetic construct
  source 1..20: mol_type = other RNA
ctccaatatcctcgtgaaga

SEQ ID NO: 9208 - RNA, 20 nt, synthetic construct
  source 1..20: mol_type = other RNA
ccaatatcctcgtgaagaac

SEQ ID NO: 9209 - RNA, 20 nt, synthetic construct
  source 1..20: mol_type = other RNA
gcagtcaagatctttcccta

SEQ ID NO: 9210 - RNA, 20 nt, synthetic construct
  source 1..20: mol_type = other RNA
agtcaagatctttccctatg

SEQ ID NO: 9211 - RNA, 20 nt, synthetic construct
  source 1..20: mol_type = other RNA
gtcaagatctttccctatga

SEQ ID NO: 9212 - RNA, 20 nt, synthetic construct
  source 1..20: mol_type = other RNA
ggcagtcaagatctttccct

SEQ ID NO: 9213 - RNA, 20 nt, synthetic construct
  source 1..20: mol_type = other RNA
cagtcaagatctttccctat

SEQ ID NO: 9214 - RNA, 20 nt, synthetic construct
  source 1..20: mol_type = other RNA
tcaagatctttccctatgag

SEQ ID NO: 9215 - RNA, 20 nt, synthetic construct
  source 1..20: mol_type = other RNA
ttgcagacttcggcctttct

SEQ ID NO: 9216 - RNA, 20 nt, synthetic construct
  source 1..20: mol_type = other RNA
tgcagacttcggcctttctc

SEQ ID NO: 9217 - RNA, 20 nt, synthetic construct
  source 1..20: mol_type = other RNA
gcagacttcggcctttctcg

SEQ ID NO: 9218 - RNA, 20 nt, synthetic construct
  source 1..20: mol_type = other RNA
cagacttcggcctttctcgg

SEQ ID NO: 9219 - RNA, 20 nt, synthetic construct
  source 1..20: mol_type = other RNA
attgcagacttcggcctttc

SEQ ID NO: 9220 - RNA, 20 nt, synthetic construct
  source 1..20: mol_type = other RNA
agggacctggctgcccggaa

SEQ ID NO: 9221 - RNA, 20 nt, synthetic construct
  source 1..20: mol_type = other RNA
acagggacctggctgcccgg

SEQ ID NO: 9222 - RNA, 20 nt, synthetic construct
  source 1..20: mol_type = other RNA
cagggacctggctgcccgga

SEQ ID NO: 9223 - RNA, 20 nt, synthetic construct
  source 1..20: mol_type = other RNA
gggacctggctgcccggaat

SEQ ID NO: 9224 - RNA, 20 nt, synthetic construct
  source 1..20: mol_type = other RNA
gcccggaatgtgctggtcgg

SEQ ID NO: 9225 - RNA, 20 nt, synthetic construct
  source 1..20: mol_type = other RNA
ccggaatgtgctggtcggag

SEQ ID NO: 9226 - RNA, 20 nt, synthetic construct
  source 1..20: mol_type = other RNA
tgcccggaatgtgctggtcg

SEQ ID NO: 9227 - RNA, 20 nt, synthetic construct
  source 1..20: mol_type = other RNA
cccggaatgtgctggtcgga

SEQ ID NO: 9228 - RNA, 20 nt, synthetic construct
  source 1..20: mol_type = other RNA
cggaatgtgctggtcggaga

SEQ ID NO: 9229 - RNA, 20 nt, synthetic construct
  source 1..20: mol_type = other RNA
ggaatgtgctggtcggagag

SEQ ID NO: 9230 - RNA, 20 nt, synthetic construct
  source 1..20: mol_type = other RNA
caaaatgctgaaaggtccac

SEQ ID NO: 9231 - RNA, 20 nt, synthetic construct
  source 1..20: mol_type = other RNA
agccatcaaaatgctgaaag

SEQ ID NO: 9232 - RNA, 20 nt, synthetic construct
  source 1..20: mol_type = other RNA
gccatcaaaatgctgaaagg

SEQ ID NO: 9233 - RNA, 20 nt, synthetic construct
  source 1..20: mol_type = other RNA
ccatcaaaatgctgaaaggt

SEQ ID NO: 9234 - RNA, 20 nt, synthetic construct
  source 1..20: mol_type = other RNA
catcaaaatgctgaaaggtc

SEQ ID NO: 9235 - RNA, 20 nt, synthetic construct
  source 1..20: mol_type = other RNA
atcaaaatgctgaaaggtcc

SEQ ID NO: 9236 - RNA, 20 nt, synthetic construct
  source 1..20: mol_type = other RNA
tcaaaatgctgaaaggtcca

SEQ ID NO: 9237 - RNA, 20 nt, synthetic construct
  source 1..20: mol_type = other RNA
atgatcttaagccaggtaat

SEQ ID NO: 9238 - RNA, 20 nt, synthetic construct
  source 1..20: mol_type = other RNA
tatgatcttaagccaggtaa

SEQ ID NO: 9239 - RNA, 20 nt, synthetic construct
  source 1..20: mol_type = other RNA
ttatgatcttaagccaggta

SEQ ID NO: 9240 - RNA, 20 nt, synthetic construct
  source 1..20: mol_type = other RNA
attatgatcttaagccaggt

SEQ ID NO: 9241 - RNA, 20 nt, synthetic construct
  source 1..20: mol_type = other RNA
cattatgatcttaagccagg

SEQ ID NO: 9242 - RNA, 20 nt, synthetic construct
  source 1..20: mol_type = other RNA
gaaacatcctactggtagat

SEQ ID NO: 9243 - RNA, 20 nt, synthetic construct
  source 1..20: mol_type = other RNA
ggaaacatcctactggtaga

SEQ ID NO: 9244 - RNA, 20 nt, synthetic construct
  source 1..20: mol_type = other RNA
ttaggaaacatcctactggt

SEQ ID NO: 9245 - RNA, 20 nt, synthetic construct
  source 1..20: mol_type = other RNA
aggaaacatcctactggtag

SEQ ID NO: 9246 - RNA, 20 nt, synthetic construct
  source 1..20: mol_type = other RNA
taggaaacatcctactggta

SEQ ID NO: 9247 - RNA, 20 nt, synthetic construct
  source 1..20: mol_type = other RNA
cttaggaaacatcctactgg

SEQ ID NO: 9248 - RNA, 20 nt, synthetic construct
  source 1..20: mol_type = other RNA
tgaagatacatcagcttaat

SEQ ID NO: 9249 - RNA, 20 nt, synthetic construct
  source 1..20: mol_type = other RNA
gtgaagatacatcagcttaa

SEQ ID NO: 9250 - RNA, 20 nt, synthetic construct
  source 1..20: mol_type = other RNA
tgtgaagatacatcagctta

SEQ ID NO: 9251 - RNA, 20 nt, synthetic construct
  source 1..20: mol_type = other RNA
ctgtgaagatacatcagctt

SEQ ID NO: 9252 - RNA, 20 nt, synthetic construct
  source 1..20: mol_type = other RNA
gctgtgaagatacatcagct

SEQ ID NO: 9253 - RNA, 20 nt, synthetic construct
  source 1..20: mol_type = other RNA
tgctgtgaagatacatcagc

SEQ ID NO: 9254 - RNA, 20 nt, synthetic construct
  source 1..20: mol_type = other RNA
ctatgacctcaaaccaggta

SEQ ID NO: 9255 - RNA, 20 nt, synthetic construct
  source 1..20: mol_type = other RNA
cactatgacctcaaaccagg

SEQ ID NO: 9256 - RNA, 20 nt, synthetic construct
  source 1..20: mol_type = other RNA
actatgacctcaaaccaggt

SEQ ID NO: 9257 - RNA, 20 nt, synthetic construct
  source 1..20: mol_type = other RNA
tatgacctcaaaccaggtat

SEQ ID NO: 9258 - RNA, 20 nt, synthetic construct
  source 1..20: mol_type = other RNA
atgacctcaaaccaggtatg

SEQ ID NO: 9259 - RNA, 20 nt, synthetic construct
  source 1..20: mol_type = other RNA
agctgtgaaaattcaccagt

SEQ ID NO: 9260 - RNA, 20 nt, synthetic construct
  source 1..20: mol_type = other RNA
gctgtgaaaattcaccagtt

SEQ ID NO: 9261 - RNA, 20 nt, synthetic construct
  source 1..20: mol_type = other RNA
ctgtgaaaattcaccagtta

SEQ ID NO: 9262 - RNA, 20 nt, synthetic construct
  source 1..20: mol_type = other RNA
tgtgaaaattcaccagttaa

SEQ ID NO: 9263 - RNA, 20 nt, synthetic construct
  source 1..20: mol_type = other RNA
gtgaaaattcaccagttaaa

SEQ ID NO: 9264 - RNA, 20 nt, synthetic construct
  source 1..20: mol_type = other RNA
tgaaaattcaccagttaaat

SEQ ID NO: 9265 - RNA, 20 nt, synthetic construct
  source 1..20: mol_type = other RNA
gaaaattcaccagttaaata

SEQ ID NO: 9266 - RNA, 20 nt, synthetic construct
  source 1..20: mol_type = other RNA
atagtggactttggagtcag

SEQ ID NO: 9267 - RNA, 20 nt, synthetic construct
  source 1..20: mol_type = other RNA
tggactttggagtcagtgct

SEQ ID NO: 9268 - RNA, 20 nt, synthetic construct
  source 1..20: mol_type = other RNA
gtggactttggagtcagtgc

SEQ ID NO: 9269 - RNA, 20 nt, synthetic construct
  source 1..20: mol_type = other RNA
agtggactttggagtcagtg

SEQ ID NO: 9270 - RNA, 20 nt, synthetic construct
  source 1..20: mol_type = other RNA
tagtggactttggagtcagt

SEQ ID NO: 9271 - RNA, 20 nt, synthetic construct
  source 1..20: mol_type = other RNA
cgagatattaaagggcaaaa

SEQ ID NO: 9272 - RNA, 20 nt, synthetic construct
  source 1..20: mol_type = other RNA
gagatattaaagggcaaaat

SEQ ID NO: 9273 - RNA, 20 nt, synthetic construct
  source 1..20: mol_type = other RNA
tcgagatattaaagggcaaa

SEQ ID NO: 9274 - RNA, 20 nt, synthetic construct
  source 1..20: mol_type = other RNA
atcgagatattaaagggcaa

SEQ ID NO: 9275 - RNA, 20 nt, synthetic construct
  source 1..20: mol_type = other RNA
catcgagatattaaagggca

SEQ ID NO: 9276 - RNA, 20 nt, synthetic construct
  source 1..20: mol_type = other RNA
gggcaaaatgtcttgctgac

SEQ ID NO: 9277 - RNA, 20 nt, synthetic construct
  source 1..20: mol_type = other RNA
aaaatgtcttgctgactgaa

SEQ ID NO: 9278 - RNA, 20 nt, synthetic construct
  source 1..20: mol_type = other RNA
caaaatgtcttgctgactga

SEQ ID NO: 9279 - RNA, 20 nt, synthetic construct
  source 1..20: mol_type = other RNA
gcaaaatgtcttgctgactg

SEQ ID NO: 9280 - RNA, 20 nt, synthetic construct
  source 1..20: mol_type = other RNA
ggcaaaatgtcttgctgact

SEQ ID NO: 9281 - RNA, 20 nt, synthetic construct
  source 1..20: mol_type = other RNA
agggcaaaatgtcttgctga

SEQ ID NO: 9282 - RNA, 20 nt, synthetic construct
  source 1..20: mol_type = other RNA
tcaaggttatggatgtcaca

SEQ ID NO: 9283 - RNA, 20 nt, synthetic construct
  source 1..20: mol_type = other RNA
atcaaggttatggatgtcac

SEQ ID NO: 9284 - RNA, 20 nt, synthetic construct
  source 1..20: mol_type = other RNA
catcaaggttatggatgtca

SEQ ID NO: 9285 - RNA, 20 nt, synthetic construct
  source 1..20: mol_type = other RNA
ccatcaaggttatggatgtc

SEQ ID NO: 9286 - RNA, 20 nt, synthetic construct
  source 1..20: mol_type = other RNA
gccatcaaggttatggatgt

SEQ ID NO: 9287 - RNA, 20 nt, synthetic construct
  source 1..20: mol_type = other RNA
agccatcaaggttatggatg

SEQ ID NO: 9288 - RNA, 20 nt, synthetic construct
  source 1..20: mol_type = other RNA
tggctgacttcgggctggtg

SEQ ID NO: 9289 - RNA, 20 nt, synthetic construct
  source 1..20: mol_type = other RNA
ggctgacttcgggctggtgc

SEQ ID NO: 9290 - RNA, 20 nt, synthetic construct
  source 1..20: mol_type = other RNA
gtggctgacttcgggctggt

SEQ ID NO: 9291 - RNA, 20 nt, synthetic construct
  source 1..20: mol_type = other RNA
gctgacttcgggctggtgcg

SEQ ID NO: 9292 - RNA, 20 nt, synthetic construct
  source 1..20: mol_type = other RNA
ctgacttcgggctggtgcgg

SEQ ID NO: 9293 - RNA, 20 nt, synthetic construct
  source 1..20: mol_type = other RNA
caccgagacctcgctacgcg

SEQ ID NO: 9294 - RNA, 20 nt, synthetic construct
  source 1..20: mol_type = other RNA
accgagacctcgctacgcgc

SEQ ID NO: 9295 - RNA, 20 nt, synthetic construct
  source 1..20: mol_type = other RNA
ccgagacctcgctacgcgca

SEQ ID NO: 9296 - RNA, 20 nt, synthetic construct
  source 1..20: mol_type = other RNA
cgagacctcgctacgcgcaa

SEQ ID NO: 9297 - RNA, 20 nt, synthetic construct
  source 1..20: mol_type = other RNA
gagacctcgctacgcgcaac

SEQ ID NO: 9298 - RNA, 20 nt, synthetic construct
  source 1..20: mol_type = other RNA
tacgcgcaacctactgctgg

SEQ ID NO: 9299 - RNA, 20 nt, synthetic construct
  source 1..20: mol_type = other RNA
gcgcaacctactgctggcgt

SEQ ID NO: 9300 - RNA, 20 nt, synthetic construct
  source 1..20: mol_type = other RNA
acgcgcaacctactgctggc

SEQ ID NO: 9301 - RNA, 20 nt, synthetic construct
  source 1..20: mol_type = other RNA
cgcgcaacctactgctggcg

SEQ ID NO: 9302 - RNA, 20 nt, synthetic construct
  source 1..20: mol_type = other RNA
cgcaacctactgctggcgtc

SEQ ID NO: 9303 - RNA, 20 nt, synthetic construct
  source 1..20: mol_type = other RNA
gcaacctactgctggcgtcg

SEQ ID NO: 9304 - RNA, 20 nt, synthetic construct
  source 1..20: mol_type = other RNA
gctgtcaagtccctccgggt

SEQ ID NO: 9305 - RNA, 20 nt, synthetic construct
  source 1..20: mol_type = other RNA
ctgtcaagtccctccgggta

SEQ ID NO: 9306 - RNA, 20 nt, synthetic construct
  source 1..20: mol_type = other RNA
ggctgtcaagtccctccggg

SEQ ID NO: 9307 - RNA, 20 nt, synthetic construct
  source 1..20: mol_type = other RNA
tgtcaagtccctccgggtag

SEQ ID NO: 9308 - RNA, 20 nt, synthetic construct
  source 1..20: mol_type = other RNA
gtcaagtccctccgggtagg

SEQ ID NO: 9309 - RNA, 20 nt, synthetic construct
  source 1..20: mol_type = other RNA
tcaagtccctccgggtaggt

SEQ ID NO: 9310 - RNA, 20 nt, synthetic construct
  source 1..20: mol_type = other RNA
ggggactttgggctgatgcg

SEQ ID NO: 9311 - RNA, 20 nt, synthetic construct
  source 1..20: mol_type = other RNA
tcggggactttgggctgatg

SEQ ID NO: 9312 - RNA, 20 nt, synthetic construct
  source 1..20: mol_type = other RNA
gggactttgggctgatgcga

SEQ ID NO: 9313 - RNA, 20 nt, synthetic construct
  source 1..20: mol_type = other RNA
cggggactttgggctgatgc

SEQ ID NO: 9314 - RNA, 20 nt, synthetic construct
  source 1..20: mol_type = other RNA
atcggggactttgggctgat

SEQ ID NO: 9315 - RNA, 20 nt, synthetic construct
  source 1..20: mol_type = other RNA
gtgacctggctgcccgcaat

SEQ ID NO: 9316 - RNA, 20 nt, synthetic construct
  source 1..20: mol_type = other RNA
gcaatctgctgttggctacc

SEQ ID NO: 9317 - RNA, 20 nt, synthetic construct
  source 1..20: mol_type = other RNA
cgcaatctgctgttggctac

SEQ ID NO: 9318 - RNA, 20 nt, synthetic construct
  source 1..20: mol_type = other RNA
ccgcaatctgctgttggcta

SEQ ID NO: 9319 - RNA, 20 nt, synthetic construct
  source 1..20: mol_type = other RNA
cccgcaatctgctgttggct

SEQ ID NO: 9320 - RNA, 20 nt, synthetic construct
  source 1..20: mol_type = other RNA
gcccgcaatctgctgttggc

SEQ ID NO: 9321 - RNA, 20 nt, synthetic construct
  source 1..20: mol_type = other RNA
tgcccgcaatctgctgttgg

SEQ ID NO: 9322 - RNA, 20 nt, synthetic construct
  source 1..20: mol_type = other RNA
gtgaagtgcctgaagcccga

SEQ ID NO: 9323 - RNA, 20 nt, synthetic construct
  source 1..20: mol_type = other RNA
gctgtgaagtgcctgaagcc

SEQ ID NO: 9324 - RNA, 20 nt, synthetic construct
  source 1..20: mol_type = other RNA
tgaagtgcctgaagcccgat

SEQ ID NO: 9325 - RNA, 20 nt, synthetic construct
  source 1..20: mol_type = other RNA
tgtgaagtgcctgaagcccg

SEQ ID NO: 9326 - RNA, 20 nt, synthetic construct
  source 1..20: mol_type = other RNA
ctgtgaagtgcctgaagccc

SEQ ID NO: 9327 - RNA, 20 nt, synthetic construct
  source 1..20: mol_type = other RNA
ggctgtgaagtgcctgaagc

SEQ ID NO: 9328 - RNA, 20 nt, synthetic construct
  source 1..20: mol_type = other RNA
catcgtgacttgaacaggta

SEQ ID NO: 9329 - RNA, 20 nt, synthetic construct
  source 1..20: mol_type = other RNA
atcgtgacttgaacaggtat

SEQ ID NO: 9330 - RNA, 20 nt, synthetic construct
  source 1..20: mol_type = other RNA
tcgtgacttgaacaggtatt

SEQ ID NO: 9331 - RNA, 20 nt, synthetic construct
  source 1..20: mol_type = other RNA
cgtgacttgaacaggtattt

SEQ ID NO: 9332 - RNA, 20 nt, synthetic construct
  source 1..20: mol_type = other RNA
agtcacaatattcttctcta

SEQ ID NO: 9333 - RNA, 20 nt, synthetic construct
  source 1..20: mol_type = other RNA
tcacaatattcttctctatg

SEQ ID NO: 9334 - RNA, 20 nt, synthetic construct
  source 1..20: mol_type = other RNA
cacaatattcttctctatga

SEQ ID NO: 9335 - RNA, 20 nt, synthetic construct
  source 1..20: mol_type = other RNA
cagtcacaatattcttctct

SEQ ID NO: 9336 - RNA, 20 nt, synthetic construct
  source 1..20: mol_type = other RNA
gtcacaatattcttctctat

SEQ ID NO: 9337 - RNA, 20 nt, synthetic construct
  source 1..20: mol_type = other RNA
acaatattcttctctatgag

SEQ ID NO: 9338 - RNA, 20 nt, synthetic construct
  source 1..20: mol_type = other RNA
taaaacggtaagcaagcaaa

SEQ ID NO: 9339 - RNA, 20 nt, synthetic construct
  source 1..20: mol_type = other RNA
ggctataaaacggtaagcaa

SEQ ID NO: 9340 - RNA, 20 nt, synthetic construct
  source 1..20: mol_type = other RNA
gctataaaacggtaagcaag

SEQ ID NO: 9341 - RNA, 20 nt, synthetic construct
  source 1..20: mol_type = other RNA
ctataaaacggtaagcaagc

SEQ ID NO: 9342 - RNA, 20 nt, synthetic construct
  source 1..20: mol_type = other RNA
tataaaacggtaagcaagca

SEQ ID NO: 9343 - RNA, 20 nt, synthetic construct
  source 1..20: mol_type = other RNA
ataaaacggtaagcaagcaa

SEQ ID NO: 9344 - RNA, 20 nt, synthetic construct
  source 1..20: mol_type = other RNA
aaaacggtaagcaagcaaat

SEQ ID NO: 9345 - RNA, 20 nt, synthetic construct
  source 1..20: mol_type = other RNA
tagactttgggctgagtttc

SEQ ID NO: 9346 - RNA, 20 nt, synthetic construct
  source 1..20: mol_type = other RNA
atagactttgggctgagttt

SEQ ID NO: 9347 - RNA, 20 nt, synthetic construct
  source 1..20: mol_type = other RNA
catagactttgggctgagtt

SEQ ID NO: 9348 - RNA, 20 nt, synthetic construct
  source 1..20: mol_type = other RNA
tcatagactttgggctgagt

SEQ ID NO: 9349 - RNA, 20 nt, synthetic construct
  source 1..20: mol_type = other RNA
ctcatagactttgggctgag

SEQ ID NO: 9350 - RNA, 20 nt, synthetic construct
  source 1..20: mol_type = other RNA
gtgatctcaccacctccaac

SEQ ID NO: 9351 - RNA, 20 nt, synthetic construct
  source 1..20: mol_type = other RNA
ggtgatctcaccacctccaa

SEQ ID NO: 9352 - RNA, 20 nt, synthetic construct
  source 1..20: mol_type = other RNA
tggtgatctcaccacctcca

SEQ ID NO: 9353 - RNA, 20 nt, synthetic construct
  source 1..20: mol_type = other RNA
atggtgatctcaccacctcc

SEQ ID NO: 9354 - RNA, 20 nt, synthetic construct
  source 1..20: mol_type = other RNA
catggtgatctcaccacctc

SEQ ID NO: 9355 - RNA, 20 nt, synthetic construct
  source 1..20: mol_type = other RNA
ccaacatgctcctgaaaccc

SEQ ID NO: 9356 - RNA, 20 nt, synthetic construct
  source 1..20: mol_type = other RNA
tccaacatgctcctgaaacc

SEQ ID NO: 9357 - RNA, 20 nt, synthetic construct
  source 1..20: mol_type = other RNA
ctccaacatgctcctgaaac

SEQ ID NO: 9358 - RNA, 20 nt, synthetic construct
  source 1..20: mol_type = other RNA
cctccaacatgctcctgaaa

SEQ ID NO: 9359 - RNA, 20 nt, synthetic construct
  source 1..20: mol_type = other RNA
acctccaacatgctcctgaa

SEQ ID NO: 9360 - RNA, 20 nt, synthetic construct
  source 1..20: mol_type = other RNA
cacctccaacatgctcctga

SEQ ID NO: 9361 - RNA, 20 nt, synthetic construct
  source 1..20: mol_type = other RNA
tcaagcaccgcttccccaag

SEQ ID NO: 9362 - RNA, 20 nt, synthetic construct
  source 1..20: mol_type = other RNA
atcaagcaccgcttccccaa

SEQ ID NO: 9363 - RNA, 20 nt, synthetic construct
  source 1..20: mol_type = other RNA
gatcaagcaccgcttcccca

SEQ ID NO: 9364 - RNA, 20 nt, synthetic construct
  source 1..20: mol_type = other RNA
tgatcaagcaccgcttcccc

SEQ ID NO: 9365 - RNA, 20 nt, synthetic construct
  source 1..20: mol_type = other RNA
gtgatcaagcaccgcttccc

SEQ ID NO: 9366 - RNA, 20 nt, synthetic construct
  source 1..20: mol_type = other RNA
ggtgatcaagcaccgcttcc

SEQ ID NO: 9367 - RNA, 20 nt, synthetic construct
  source 1..20: mol_type = other RNA
ggggacctgaagcttaggaa

SEQ ID NO: 9368 - RNA, 20 nt, synthetic construct
  source 1..20: mol_type = other RNA
gggacctgaagcttaggaag

SEQ ID NO: 9369 - RNA, 20 nt, synthetic construct
  source 1..20: mol_type = other RNA
cgctgcaaggtaggcgctcc

SEQ ID NO: 9370 - RNA, 20 nt, synthetic construct
  source 1..20: mol_type = other RNA
gctgcaaggtaggcgctccc

SEQ ID NO: 9371 - RNA, 20 nt, synthetic construct
  source 1..20: mol_type = other RNA
ctgcaaggtaggcgctcccg

SEQ ID NO: 9372 - RNA, 20 nt, synthetic construct
  source 1..20: mol_type = other RNA
gcgctgcaaggtaggcgctc

SEQ ID NO: 9373 - RNA, 20 nt, synthetic construct
  source 1..20: mol_type = other RNA
tgcaaggtaggcgctcccgg

SEQ ID NO: 9374 - RNA, 20 nt, synthetic construct
  source 1..20: mol_type = other RNA
gcaaggtaggcgctcccggg

SEQ ID NO: 9375 - RNA, 20 nt, synthetic construct
  source 1..20: mol_type = other RNA
ctgcgggacctcaagctgcg

SEQ ID NO: 9376 - RNA, 20 nt, synthetic construct
  source 1..20: mol_type = other RNA
tgcgggacctcaagctgcgg

SEQ ID NO: 9377 - RNA, 20 nt, synthetic construct
  source 1..20: mol_type = other RNA
gcgggacctcaagctgcgga

SEQ ID NO: 9378 - RNA, 20 nt, synthetic construct
  source 1..20: mol_type = other RNA
cgggacctcaagctgcggaa

SEQ ID NO: 9379 - RNA, 20 nt, synthetic construct
  source 1..20: mol_type = other RNA
gggacctcaagctgcggaaa

SEQ ID NO: 9380 - RNA, 20 nt, synthetic construct
  source 1..20: mol_type = other RNA
ggtgtgcaaggtaaagggcc

SEQ ID NO: 9381 - RNA, 20 nt, synthetic construct
  source 1..20: mol_type = other RNA
tgtgcaaggtaaagggccag

SEQ ID NO: 9382 - RNA, 20 nt, synthetic construct
  source 1..20: mol_type = other RNA
gtgcaaggtaaagggccagt

SEQ ID NO: 9383 - RNA, 20 nt, synthetic construct
  source 1..20: mol_type = other RNA
tgcaaggtaaagggccagtg

SEQ ID NO: 9384 - RNA, 20 nt, synthetic construct
  source 1..20: mol_type = other RNA
gtgtgcaaggtaaagggcca

SEQ ID NO: 9385 - RNA, 20 nt, synthetic construct
  source 1..20: mol_type = other RNA
gcaaggtaaagggccagtgg

SEQ ID NO: 9386 - RNA, 20 nt, synthetic construct
  source 1..20: mol_type = other RNA
tgcgtgatctcaagctgtgt

SEQ ID NO: 9387 - RNA, 20 nt, synthetic construct
  source 1..20: mol_type = other RNA
ctgcgtgatctcaagctgtg

SEQ ID NO: 9388 - RNA, 20 nt, synthetic construct
  source 1..20: mol_type = other RNA
gcgtgatctcaagctgtgtc

SEQ ID NO: 9389 - RNA, 20 nt, synthetic construct
  source 1..20: mol_type = other RNA
cgtgatctcaagctgtgtcg

SEQ ID NO: 9390 - RNA, 20 nt, synthetic construct
  source 1..20: mol_type = other RNA
gtgatctcaagctgtgtcgc

SEQ ID NO: 9391 - RNA, 20 nt, synthetic construct
  source 1..20: mol_type = other RNA
acctgcaaggtacgtgccca

SEQ ID NO: 9392 - RNA, 20 nt, synthetic construct
  source 1..20: mol_type = other RNA
cctgcaaggtacgtgcccat

SEQ ID NO: 9393 - RNA, 20 nt, synthetic construct
  source 1..20: mol_type = other RNA
ctgcaaggtacgtgcccatg

SEQ ID NO: 9394 - RNA, 20 nt, synthetic construct
  source 1..20: mol_type = other RNA
gcaaggtacgtgcccatggg

SEQ ID NO: 9395 - RNA, 20 nt, synthetic construct
  source 1..20: mol_type = other RNA
tacctgcaaggtacgtgccc

SEQ ID NO: 9396 - RNA, 20 nt, synthetic construct
  source 1..20: mol_type = other RNA
tgcaaggtacgtgcccatgg

SEQ ID NO: 9397 - RNA, 20 nt, synthetic construct
  source 1..20: mol_type = other RNA
ctggctgactttggagatgc

SEQ ID NO: 9398 - RNA, 20 nt, synthetic construct
  source 1..20: mol_type = other RNA
tggctgactttggagatgct

SEQ ID NO: 9399 - RNA, 20 nt, synthetic construct
  source 1..20: mol_type = other RNA
ggctgactttggagatgctg

SEQ ID NO: 9400 - RNA, 20 nt, synthetic construct
  source 1..20: mol_type = other RNA
gctgactttggagatgctgt

SEQ ID NO: 9401 - RNA, 20 nt, synthetic construct
  source 1..20: mol_type = other RNA
ctgactttggagatgctgtt

SEQ ID NO: 9402 - RNA, 20 nt, synthetic construct
  source 1..20: mol_type = other RNA
cacctggacctaaaggttgg

SEQ ID NO: 9403 - RNA, 20 nt, synthetic construct
  source 1..20: mol_type = other RNA
cctggacctaaaggttggtg

SEQ ID NO: 9404 - RNA, 20 nt, synthetic construct
  source 1..20: mol_type = other RNA
ctggacctaaaggttggtga

SEQ ID NO: 9405 - RNA, 20 nt, synthetic construct
  source 1..20: mol_type = other RNA
acctggacctaaaggttggt

SEQ ID NO: 9406 - RNA, 20 nt, synthetic construct
  source 1..20: mol_type = other RNA
tggacctaaaggttggtgag

SEQ ID NO: 9407 - RNA, 20 nt, synthetic construct
  source 1..20: mol_type = other RNA
cctgagaatatcctggtgga

SEQ ID NO: 9408 - RNA, 20 nt, synthetic construct
  source 1..20: mol_type = other RNA
tgagaatatcctggtggatg

SEQ ID NO: 9409 - RNA, 20 nt, synthetic construct
  source 1..20: mol_type = other RNA
agaatatcctggtggatgag

SEQ ID NO: 9410 - RNA, 20 nt, synthetic construct
  source 1..20: mol_type = other RNA
gcctgagaatatcctggtgg

SEQ ID NO: 9411 - RNA, 20 nt, synthetic construct
  source 1..20: mol_type = other RNA
ctgagaatatcctggtggat

SEQ ID NO: 9412 - RNA, 20 nt, synthetic construct
  source 1..20: mol_type = other RNA
gagaatatcctggtggatga

SEQ ID NO: 9413 - RNA, 20 nt, synthetic construct
  source 1..20: mol_type = other RNA
ggccactaagtttgtgaaca

SEQ ID NO: 9414 - RNA, 20 nt, synthetic construct
  source 1..20: mol_type = other RNA
cactaagtttgtgaacaaga

SEQ ID NO: 9415 - RNA, 20 nt, synthetic construct
  source 1..20: mol_type = other RNA
gccactaagtttgtgaacaa

SEQ ID NO: 9416 - RNA, 20 nt, synthetic construct
  source 1..20: mol_type = other RNA
ccactaagtttgtgaacaag

SEQ ID NO: 9417 - RNA, 20 nt, synthetic construct
  source 1..20: mol_type = other RNA
actaagtttgtgaacaagaa

SEQ ID NO: 9418 - RNA, 20 nt, synthetic construct
  source 1..20: mol_type = other RNA
ctaagtttgtgaacaagaag

SEQ ID NO: 9419 - RNA, 20 nt, synthetic construct
  source 1..20: mol_type = other RNA
cagatccatctgttataaaa

SEQ ID NO: 9420 - RNA, 20 nt, synthetic construct
  source 1..20: mol_type = other RNA
acagatccatctgttataaa

SEQ ID NO: 9421 - RNA, 20 nt, synthetic construct
  source 1..20: mol_type = other RNA
gacagatccatctgttataa

SEQ ID NO: 9422 - RNA, 20 nt, synthetic construct
  source 1..20: mol_type = other RNA
tgacagatccatctgttata

SEQ ID NO: 9423 - RNA, 20 nt, synthetic construct
  source 1..20: mol_type = other RNA
ttgacagatccatctgttat

SEQ ID NO: 9424 - RNA, 20 nt, synthetic construct
  source 1..20: mol_type = other RNA
tagatttgcaaggtgattga

SEQ ID NO: 9425 - RNA, 20 nt, synthetic construct
  source 1..20: mol_type = other RNA
ttagatttgcaaggtgattg

SEQ ID NO: 9426 - RNA, 20 nt, synthetic construct
  source 1..20: mol_type = other RNA
tttagatttgcaaggtgatt

SEQ ID NO: 9427 - RNA, 20 nt, synthetic construct
  source 1..20: mol_type = other RNA
gcaaggtgattgatgatgta

SEQ ID NO: 9428 - RNA, 20 nt, synthetic construct
  source 1..20: mol_type = other RNA
tgcaaggtgattgatgatgt

SEQ ID NO: 9429 - RNA, 20 nt, synthetic construct
  source 1..20: mol_type = other RNA
atttgcaaggtgattgatga

SEQ ID NO: 9430 - RNA, 20 nt, synthetic construct
  source 1..20: mol_type = other RNA
ttgcaaggtgattgatgatg

SEQ ID NO: 9431 - RNA, 20 nt, synthetic construct
  source 1..20: mol_type = other RNA
tttgcaaggtgattgatgat

SEQ ID NO: 9432 - RNA, 20 nt, synthetic construct
  source 1..20: mol_type = other RNA
gatttgcaaggtgattgatg

SEQ ID NO: 9433 - RNA, 20 nt, synthetic construct
  source 1..20: mol_type = other RNA
gtcaagtcctttcttcctga

SEQ ID NO: 9434 - RNA, 20 nt, synthetic construct
  source 1..20: mol_type = other RNA
tgtcaagtcctttcttcctg

SEQ ID NO: 9435 - RNA, 20 nt, synthetic construct
  source 1..20: mol_type = other RNA
attgtcaagtcctttcttcc

SEQ ID NO: 9436 - RNA, 20 nt, synthetic construct
  source 1..20: mol_type = other RNA
tcaagtcctttcttcctgag

SEQ ID NO: 9437 - RNA, 20 nt, synthetic construct
  source 1..20: mol_type = other RNA
ttgtcaagtcctttcttcct

SEQ ID NO: 9438 - RNA, 20 nt, synthetic construct
  source 1..20: mol_type = other RNA
cattgtcaagtcctttcttc

SEQ ID NO: 9439 - RNA, 20 nt, synthetic construct
  source 1..20: mol_type = other RNA
actgacccatctgtgataaa

SEQ ID NO: 9440 - RNA, 20 nt, synthetic construct
  source 1..20: mol_type = other RNA
ctgacccatctgtgataaaa

SEQ ID NO: 9441 - RNA, 20 nt, synthetic construct
  source 1..20: mol_type = other RNA
gactgacccatctgtgataa

SEQ ID NO: 9442 - RNA, 20 nt, synthetic construct
  source 1..20: mol_type = other RNA
tgactgacccatctgtgata

SEQ ID NO: 9443 - RNA, 20 nt, synthetic construct
  source 1..20: mol_type = other RNA
ttgactgacccatctgtgat

SEQ ID NO: 9444 - RNA, 20 nt, synthetic construct
  source 1..20: mol_type = other RNA
ttgatttgcaaggtaaattt

SEQ ID NO: 9445 - RNA, 20 nt, synthetic construct
  source 1..20: mol_type = other RNA
cttgatttgcaaggtaaatt

SEQ ID NO: 9446 - RNA, 20 nt, synthetic construct
  source 1..20: mol_type = other RNA
acttgatttgcaaggtaaat

SEQ ID NO: 9447 - RNA, 20 nt, synthetic construct
  source 1..20: mol_type = other RNA
tacttgatttgcaaggtaaa

SEQ ID NO: 9448 - RNA, 20 nt, synthetic construct
  source 1..20: mol_type = other RNA
gtacttgatttgcaaggtaa

SEQ ID NO: 9449 - RNA, 20 nt, synthetic construct
  source 1..20: mol_type = other RNA
gcaaggtaaatttattaaaa

SEQ ID NO: 9450 - RNA, 20 nt, synthetic construct
  source 1..20: mol_type = other RNA
tgcaaggtaaatttattaaa

SEQ ID NO: 9451 - RNA, 20 nt, synthetic construct
  source 1..20: mol_type = other RNA
ttgcaaggtaaatttattaa

SEQ ID NO: 9452 - RNA, 20 nt, synthetic construct
  source 1..20: mol_type = other RNA
tttgcaaggtaaatttatta

SEQ ID NO: 9453 - RNA, 20 nt, synthetic construct
  source 1..20: mol_type = other RNA
atttgcaaggtaaatttatt

SEQ ID NO: 9454 - RNA, 20 nt, synthetic construct
  source 1..20: mol_type = other RNA
gatttgcaaggtaaatttat

SEQ ID NO: 9455 - RNA, 20 nt, synthetic construct
  source 1..20: mol_type = other RNA
ccgacttcagcttctccaag

SEQ ID NO: 9456 - RNA, 20 nt, synthetic construct
  source 1..20: mol_type = other RNA
gtccgacttcagcttctcca

SEQ ID NO: 9457 - RNA, 20 nt, synthetic construct
  source 1..20: mol_type = other RNA
tccgacttcagcttctccaa

SEQ ID NO: 9458 - RNA, 20 nt, synthetic construct
  source 1..20: mol_type = other RNA
tgtccgacttcagcttctcc

SEQ ID NO: 9459 - RNA, 20 nt, synthetic construct
  source 1..20: mol_type = other RNA
ctgtccgacttcagcttctc

SEQ ID NO: 9460 - RNA, 20 nt, synthetic construct
  source 1..20: mol_type = other RNA
gggacctcaagtgtgacaac

SEQ ID NO: 9461 - RNA, 20 nt, synthetic construct
  source 1..20: mol_type = other RNA
cgggacctcaagtgtgacaa

SEQ ID NO: 9462 - RNA, 20 nt, synthetic construct
  source 1..20: mol_type = other RNA
ccgggacctcaagtgtgaca

SEQ ID NO: 9463 - RNA, 20 nt, synthetic construct
  source 1..20: mol_type = other RNA
accgggacctcaagtgtgac

SEQ ID NO: 9464 - RNA, 20 nt, synthetic construct
  source 1..20: mol_type = other RNA
caccgggacctcaagtgtga

SEQ ID NO: 9465 - RNA, 20 nt, synthetic construct
  source 1..20: mol_type = other RNA
gacaaccttctccttgacaa

SEQ ID NO: 9466 - RNA, 20 nt, synthetic construct
  source 1..20: mol_type = other RNA
tgacaaccttctccttgaca

SEQ ID NO: 9467 - RNA, 20 nt, synthetic construct
  source 1..20: mol_type = other RNA
acaaccttctccttgacaag

SEQ ID NO: 9468 - RNA, 20 nt, synthetic construct
  source 1..20: mol_type = other RNA
gtgacaaccttctccttgac

SEQ ID NO: 9469 - RNA, 20 nt, synthetic construct
  source 1..20: mol_type = other RNA
tgtgacaaccttctccttga

SEQ ID NO: 9470 - RNA, 20 nt, synthetic construct
  source 1..20: mol_type = other RNA
gtgtgacaaccttctccttg

SEQ ID NO: 9471 - RNA, 20 nt, synthetic construct
  source 1..20: mol_type = other RNA
gatcaagatcatcgaccgca

SEQ ID NO: 9472 - RNA, 20 nt, synthetic construct
  source 1..20: mol_type = other RNA
atcaagatcatcgaccgcaa

SEQ ID NO: 9473 - RNA, 20 nt, synthetic construct
  source 1..20: mol_type = other RNA
cgatcaagatcatcgaccgc

SEQ ID NO: 9474 - RNA, 20 nt, synthetic construct
  source 1..20: mol_type = other RNA
gcgatcaagatcatcgaccg

SEQ ID NO: 9475 - RNA, 20 nt, synthetic construct
  source 1..20: mol_type = other RNA
ggcgatcaagatcatcgacc

SEQ ID NO: 9476 - RNA, 20 nt, synthetic construct
  source 1..20: mol_type = other RNA
tcaagatcatcgaccgcaag

SEQ ID NO: 9477 - RNA, 20 nt, synthetic construct
  source 1..20: mol_type = other RNA
gtctgactttggcttctcca

SEQ ID NO: 9478 - RNA, 20 nt, synthetic construct
  source 1..20: mol_type = other RNA
ctgactttggcttctccaag

SEQ ID NO: 9479 - RNA, 20 nt, synthetic construct
  source 1..20: mol_type = other RNA
ctgtctgactttggcttctc

SEQ ID NO: 9480 - RNA, 20 nt, synthetic construct
  source 1..20: mol_type = other RNA
tgtctgactttggcttctcc

SEQ ID NO: 9481 - RNA, 20 nt, synthetic construct
  source 1..20: mol_type = other RNA
tctgactttggcttctccaa

SEQ ID NO: 9482 - RNA, 20 nt, synthetic construct
  source 1..20: mol_type = other RNA
caccgggacctcaagtgcga

SEQ ID NO: 9483 - RNA, 20 nt, synthetic construct
  source 1..20: mol_type = other RNA
accgggacctcaagtgcgag

SEQ ID NO: 9484 - RNA, 20 nt, synthetic construct
  source 1..20: mol_type = other RNA
ccgggacctcaagtgcgaga

SEQ ID NO: 9485 - RNA, 20 nt, synthetic construct
  source 1..20: mol_type = other RNA
cgggacctcaagtgcgagaa

SEQ ID NO: 9486 - RNA, 20 nt, synthetic construct
  source 1..20: mol_type = other RNA
gggacctcaagtgcgagaac

SEQ ID NO: 9487 - RNA, 20 nt, synthetic construct
  source 1..20: mol_type = other RNA
cgagaaccttctcctcgaca

SEQ ID NO: 9488 - RNA, 20 nt, synthetic construct
  source 1..20: mol_type = other RNA
gagaaccttctcctcgacaa

SEQ ID NO: 9489 - RNA, 20 nt, synthetic construct
  source 1..20: mol_type = other RNA
gtgcgagaaccttctcctcg

SEQ ID NO: 9490 - RNA, 20 nt, synthetic construct
  source 1..20: mol_type = other RNA
tgcgagaaccttctcctcga

SEQ ID NO: 9491 - RNA, 20 nt, synthetic construct
  source 1..20: mol_type = other RNA
gcgagaaccttctcctcgac

SEQ ID NO: 9492 - RNA, 20 nt, synthetic construct
  source 1..20: mol_type = other RNA
agaaccttctcctcgacaag

SEQ ID NO: 9493 - RNA, 20 nt, synthetic construct
  source 1..20: mol_type = other RNA
tgtcaagatcatcgaccgca

SEQ ID NO: 9494 - RNA, 20 nt, synthetic construct
  source 1..20: mol_type = other RNA
ggctgtcaagatcatcgacc

SEQ ID NO: 9495 - RNA, 20 nt, synthetic construct
  source 1..20: mol_type = other RNA
gctgtcaagatcatcgaccg

SEQ ID NO: 9496 - RNA, 20 nt, synthetic construct
  source 1..20: mol_type = other RNA
ctgtcaagatcatcgaccgc

SEQ ID NO: 9497 - RNA, 20 nt, synthetic construct
  source 1..20: mol_type = other RNA
gtcaagatcatcgaccgcaa

SEQ ID NO: 9498 - RNA, 20 nt, synthetic construct
  source 1..20: mol_type = other RNA
gactgactttggctttgcca

SEQ ID NO: 9499 - RNA, 20 nt, synthetic construct
  source 1..20: mol_type = other RNA
ctgactgactttggctttgc

SEQ ID NO: 9500 - RNA, 20 nt, synthetic construct
  source 1..20: mol_type = other RNA
tgactgactttggctttgcc

SEQ ID NO: 9501 - RNA, 20 nt, synthetic construct
  source 1..20: mol_type = other RNA
cgggacctcaaatgtgagaa

SEQ ID NO: 9502 - RNA, 20 nt, synthetic construct
  source 1..20: mol_type = other RNA
caccgggacctcaaatgtga

SEQ ID NO: 9503 - RNA, 20 nt, synthetic construct
  source 1..20: mol_type = other RNA
accgggacctcaaatgtgag

SEQ ID NO: 9504 - RNA, 20 nt, synthetic construct
  source 1..20: mol_type = other RNA
ccgggacctcaaatgtgaga

SEQ ID NO: 9505 - RNA, 20 nt, synthetic construct
  source 1..20: mol_type = other RNA
gggacctcaaatgtgagaac

SEQ ID NO: 9506 - RNA, 20 nt, synthetic construct
  source 1..20: mol_type = other RNA
atgtgagaacgccttgttgc

SEQ ID NO: 9507 - RNA, 20 nt, synthetic construct
  source 1..20: mol_type = other RNA
tgtgagaacgccttgttgca

SEQ ID NO: 9508 - RNA, 20 nt, synthetic construct
  source 1..20: mol_type = other RNA
gtgagaacgccttgttgcag

SEQ ID NO: 9509 - RNA, 20 nt, synthetic construct
  source 1..20: mol_type = other RNA
tgagaacgccttgttgcagg

SEQ ID NO: 9510 - RNA, 20 nt, synthetic construct
  source 1..20: mol_type = other RNA
gagaacgccttgttgcaggg

SEQ ID NO: 9511 - RNA, 20 nt, synthetic construct
  source 1..20: mol_type = other RNA
agaacgccttgttgcagggc

SEQ ID NO: 9512 - RNA, 20 nt, synthetic construct
  source 1..20: mol_type = other RNA
ggcaattaaagttatagaca

SEQ ID NO: 9513 - RNA, 20 nt, synthetic construct
  source 1..20: mol_type = other RNA
aattaaagttatagacaaga

SEQ ID NO: 9514 - RNA, 20 nt, synthetic construct
  source 1..20: mol_type = other RNA
attaaagttatagacaagat

SEQ ID NO: 9515 - RNA, 20 nt, synthetic construct
  source 1..20: mol_type = other RNA
ttaaagttatagacaagatg

SEQ ID NO: 9516 - RNA, 20 nt, synthetic construct
  source 1..20: mol_type = other RNA
gcaattaaagttatagacaa

SEQ ID NO: 9517 - RNA, 20 nt, synthetic construct
  source 1..20: mol_type = other RNA
caattaaagttatagacaag

SEQ ID NO: 9518 - RNA, 20 nt, synthetic construct
  source 1..20: mol_type = other RNA
taaagttatagacaagatgg

SEQ ID NO: 9519 - RNA, 20 nt, synthetic construct
  source 1..20: mol_type = other RNA
atcagactttggctttgcca

SEQ ID NO: 9520 - RNA, 20 nt, synthetic construct
  source 1..20: mol_type = other RNA
atatcagactttggctttgc

SEQ ID NO: 9521 - RNA, 20 nt, synthetic construct
  source 1..20: mol_type = other RNA
tatcagactttggctttgcc

SEQ ID NO: 9522 - RNA, 20 nt, synthetic construct
  source 1..20: mol_type = other RNA
tcagactttggctttgccaa

SEQ ID NO: 9523 - RNA, 20 nt, synthetic construct
  source 1..20: mol_type = other RNA
cagactttggctttgccaag

SEQ ID NO: 9524 - RNA, 20 nt, synthetic construct
  source 1..20: mol_type = other RNA
ggtagggacttaaagttgga

SEQ ID NO: 9525 - RNA, 20 nt, synthetic construct
  source 1..20: mol_type = other RNA
gtagggacttaaagttggag

SEQ ID NO: 9526 - RNA, 20 nt, synthetic construct
  source 1..20: mol_type = other RNA
tagggacttaaagttggaga

SEQ ID NO: 9527 - RNA, 20 nt, synthetic construct
  source 1..20: mol_type = other RNA
agggacttaaagttggagaa

SEQ ID NO: 9528 - RNA, 20 nt, synthetic construct
  source 1..20: mol_type = other RNA
gggacttaaagttggagaac

SEQ ID NO: 9529 - RNA, 20 nt, synthetic construct
  source 1..20: mol_type = other RNA
ggagaacctgttgctggaca

SEQ ID NO: 9530 - RNA, 20 nt, synthetic construct
  source 1..20: mol_type = other RNA
agaacctgttgctggacaag

SEQ ID NO: 9531 - RNA, 20 nt, synthetic construct
  source 1..20: mol_type = other RNA
gttggagaacctgttgctgg

SEQ ID NO: 9532 - RNA, 20 nt, synthetic construct
  source 1..20: mol_type = other RNA
ttggagaacctgttgctgga

SEQ ID NO: 9533 - RNA, 20 nt, synthetic construct
  source 1..20: mol_type = other RNA
tggagaacctgttgctggac

SEQ ID NO: 9534 - RNA, 20 nt, synthetic construct
  source 1..20: mol_type = other RNA
gagaacctgttgctggacaa

SEQ ID NO: 9535 - RNA, 20 nt, synthetic construct
  source 1..20: mol_type = other RNA
ggcagtcaagatcatctcaa

SEQ ID NO: 9536 - RNA, 20 nt, synthetic construct
  source 1..20: mol_type = other RNA
agtcaagatcatctcaaaga

SEQ ID NO: 9537 - RNA, 20 nt, synthetic construct
  source 1..20: mol_type = other RNA
gcagtcaagatcatctcaaa

SEQ ID NO: 9538 - RNA, 20 nt, synthetic construct
  source 1..20: mol_type = other RNA
cagtcaagatcatctcaaag

SEQ ID NO: 9539 - RNA, 20 nt, synthetic construct
  source 1..20: mol_type = other RNA
gtcaagatcatctcaaagaa

SEQ ID NO: 9540 - RNA, 20 nt, synthetic construct
  source 1..20: mol_type = other RNA
tcaagatcatctcaaagaag

SEQ ID NO: 9541 - RNA, 20 nt, synthetic construct
  source 1..20: mol_type = other RNA
tcaccgacttcggcttcggc

SEQ ID NO: 9542 - RNA, 20 nt, synthetic construct
  source 1..20: mol_type = other RNA
ccgacttcggcttcggccgc

SEQ ID NO: 9543 - RNA, 20 nt, synthetic construct
  source 1..20: mol_type = other RNA
accgacttcggcttcggccg

SEQ ID NO: 9544 - RNA, 20 nt, synthetic construct
  source 1..20: mol_type = other RNA
caccgacttcggcttcggcc

SEQ ID NO: 9545 - RNA, 20 nt, synthetic construct
  source 1..20: mol_type = other RNA
ctcaccgacttcggcttcgg

SEQ ID NO: 9546 - RNA, 20 nt, synthetic construct
  source 1..20: mol_type = other RNA
cgcgacctcaagtgcgaaaa

SEQ ID NO: 9547 - RNA, 20 nt, synthetic construct
  source 1..20: mol_type = other RNA
gcgacctcaagtgcgaaaac

SEQ ID NO: 9548 - RNA, 20 nt, synthetic construct
  source 1..20: mol_type = other RNA
ccgcgacctcaagtgcgaaa

SEQ ID NO: 9549 - RNA, 20 nt, synthetic construct
  source 1..20: mol_type = other RNA
accgcgacctcaagtgcgaa

SEQ ID NO: 9550 - RNA, 20 nt, synthetic construct
  source 1..20: mol_type = other RNA
caccgcgacctcaagtgcga

SEQ ID NO: 9551 - RNA, 20 nt, synthetic construct
  source 1..20: mol_type = other RNA
gaaaacgtgctgctgagccc

SEQ ID NO: 9552 - RNA, 20 nt, synthetic construct
  source 1..20: mol_type = other RNA
cgaaaacgtgctgctgagcc

SEQ ID NO: 9553 - RNA, 20 nt, synthetic construct
  source 1..20: mol_type = other RNA
aaaacgtgctgctgagcccg

SEQ ID NO: 9554 - RNA, 20 nt, synthetic construct
  source 1..20: mol_type = other RNA
gcgaaaacgtgctgctgagc

SEQ ID NO: 9555 - RNA, 20 nt, synthetic construct
  source 1..20: mol_type = other RNA
tgcgaaaacgtgctgctgag

SEQ ID NO: 9556 - RNA, 20 nt, synthetic construct
  source 1..20: mol_type = other RNA
gtgcgaaaacgtgctgctga

SEQ ID NO: 9557 - RNA, 20 nt, synthetic construct
  source 1..20: mol_type = other RNA
tcaaggtggtggaccggcgg

SEQ ID NO: 9558 - RNA, 20 nt, synthetic construct
  source 1..20: mol_type = other RNA
catcaaggtggtggaccggc

SEQ ID NO: 9559 - RNA, 20 nt, synthetic construct
  source 1..20: mol_type = other RNA
ccatcaaggtggtggaccgg

SEQ ID NO: 9560 - RNA, 20 nt, synthetic construct
  source 1..20: mol_type = other RNA
ggccatcaaggtggtggacc

SEQ ID NO: 9561 - RNA, 20 nt, synthetic construct
  source 1..20: mol_type = other RNA
atcaaggtggtggaccggcg

SEQ ID NO: 9562 - RNA, 20 nt, synthetic construct
  source 1..20: mol_type = other RNA
gccatcaaggtggtggaccg

SEQ ID NO: 9563 - RNA, 20 nt, synthetic construct
  source 1..20: mol_type = other RNA
tgctggacttcgggctggcc

SEQ ID NO: 9564 - RNA, 20 nt, synthetic construct
  source 1..20: mol_type = other RNA
gctggacttcgggctggccc

SEQ ID NO: 9565 - RNA, 20 nt, synthetic construct
  source 1..20: mol_type = other RNA
atgctggacttcgggctggc

SEQ ID NO: 9566 - RNA, 20 nt, synthetic construct
  source 1..20: mol_type = other RNA
ctggacttcgggctggcccg

SEQ ID NO: 9567 - RNA, 20 nt, synthetic construct
  source 1..20: mol_type = other RNA
tggacttcgggctggcccgg

SEQ ID NO: 9568 - RNA, 20 nt, synthetic construct
  source 1..20: mol_type = other RNA
accgtgacatcaagcctgtg

SEQ ID NO: 9569 - RNA, 20 nt, synthetic construct
  source 1..20: mol_type = other RNA
caccgtgacatcaagcctgt

SEQ ID NO: 9570 - RNA, 20 nt, synthetic construct
  source 1..20: mol_type = other RNA
ccgtgacatcaagcctgtga

SEQ ID NO: 9571 - RNA, 20 nt, synthetic construct
  source 1..20: mol_type = other RNA
cgtgacatcaagcctgtgag

SEQ ID NO: 9572 - RNA, 20 nt, synthetic construct
  source 1..20: mol_type = other RNA
gtgacatcaagcctgtgagt

SEQ ID NO: 9573 - RNA, 20 nt, synthetic construct
  source 1..20: mol_type = other RNA
agtcaaactttgccatgggc

SEQ ID NO: 9574 - RNA, 20 nt, synthetic construct
  source 1..20: mol_type = other RNA
gtcaaactttgccatgggca

SEQ ID NO: 9575 - RNA, 20 nt, synthetic construct
  source 1..20: mol_type = other RNA
ccagtcaaactttgccatgg

SEQ ID NO: 9576 - RNA, 20 nt, synthetic construct
  source 1..20: mol_type = other RNA
cagtcaaactttgccatggg

SEQ ID NO: 9577 - RNA, 20 nt, synthetic construct
  source 1..20: mol_type = other RNA
tcaaactttgccatgggcag

SEQ ID NO: 9578 - RNA, 20 nt, synthetic construct
  source 1..20: mol_type = other RNA
caaactttgccatgggcagg

SEQ ID NO: 9579 - RNA, 20 nt, synthetic construct
  source 1..20: mol_type = other RNA
cctcaaggtggagtcagccc

SEQ ID NO: 9580 - RNA, 20 nt, synthetic construct
  source 1..20: mol_type = other RNA
ggccctcaaggtggagtcag

SEQ ID NO: 9581 - RNA, 20 nt, synthetic construct
  source 1..20: mol_type = other RNA
gccctcaaggtggagtcagc

SEQ ID NO: 9582 - RNA, 20 nt, synthetic construct
  source 1..20: mol_type = other RNA
ccctcaaggtggagtcagcc

SEQ ID NO: 9583 - RNA, 20 nt, synthetic construct
  source 1..20: mol_type = other RNA
ctcaaggtggagtcagccca

SEQ ID NO: 9584 - RNA, 20 nt, synthetic construct
  source 1..20: mol_type = other RNA
tcaaggtggagtcagcccag

SEQ ID NO: 9585 - RNA, 20 nt, synthetic construct
  source 1..20: mol_type = other RNA
tcgagacatcaaaccggtag

SEQ ID NO: 9586 - RNA, 20 nt, synthetic construct
  source 1..20: mol_type = other RNA
atcgagacatcaaaccggta

SEQ ID NO: 9587 - RNA, 20 nt, synthetic construct
  source 1..20: mol_type = other RNA
catcgagacatcaaaccggt

SEQ ID NO: 9588 - RNA, 20 nt, synthetic construct
  source 1..20: mol_type = other RNA
gagacatcaaaccggtaggg

SEQ ID NO: 9589 - RNA, 20 nt, synthetic construct
  source 1..20: mol_type = other RNA
cgagacatcaaaccggtagg

SEQ ID NO: 9590 - RNA, 20 nt, synthetic construct
  source 1..20: mol_type = other RNA
agtcgaacttcgctatgggt

SEQ ID NO: 9591 - RNA, 20 nt, synthetic construct
  source 1..20: mol_type = other RNA
cgaacttcgctatgggtcgc

SEQ ID NO: 9592 - RNA, 20 nt, synthetic construct
  source 1..20: mol_type = other RNA
tcgaacttcgctatgggtcg

SEQ ID NO: 9593 - RNA, 20 nt, synthetic construct
  source 1..20: mol_type = other RNA
gtcgaacttcgctatgggtc

SEQ ID NO: 9594 - RNA, 20 nt, synthetic construct
  source 1..20: mol_type = other RNA
tagtcgaacttcgctatggg

SEQ ID NO: 9595 - RNA, 20 nt, synthetic construct
  source 1..20: mol_type = other RNA
ctagtcgaacttcgctatgg

SEQ ID NO: 9596 - RNA, 20 nt, synthetic construct
  source 1..20: mol_type = other RNA
tgaaggtggaatcagctcaa

SEQ ID NO: 9597 - RNA, 20 nt, synthetic construct
  source 1..20: mol_type = other RNA
ctgaaggtggaatcagctca

SEQ ID NO: 9598 - RNA, 20 nt, synthetic construct
  source 1..20: mol_type = other RNA
actgaaggtggaatcagctc

SEQ ID NO: 9599 - RNA, 20 nt, synthetic construct
  source 1..20: mol_type = other RNA
cactgaaggtggaatcagct

SEQ ID NO: 9600 - RNA, 20 nt, synthetic construct
  source 1..20: mol_type = other RNA
gcactgaaggtggaatcagc

SEQ ID NO: 9601 - RNA, 20 nt, synthetic construct
  source 1..20: mol_type = other RNA
tgcactgaaggtggaatcag

SEQ ID NO: 9602 - RNA, 20 nt, synthetic construct
  source 1..20: mol_type = other RNA
cacagtgatcttaaaccagc

SEQ ID NO: 9603 - RNA, 20 nt, synthetic construct
  source 1..20: mol_type = other RNA
acagtgatcttaaaccagct

SEQ ID NO: 9604 - RNA, 20 nt, synthetic construct
  source 1..20: mol_type = other RNA
cagtgatcttaaaccagcta

SEQ ID NO: 9605 - RNA, 20 nt, synthetic construct
  source 1..20: mol_type = other RNA
agtgatcttaaaccagctaa

SEQ ID NO: 9606 - RNA, 20 nt, synthetic construct
  source 1..20: mol_type = other RNA
gtgatcttaaaccagctaac

SEQ ID NO: 9607 - RNA, 20 nt, synthetic construct
  source 1..20: mol_type = other RNA
ccagctaactttctgatagt

SEQ ID NO: 9608 - RNA, 20 nt, synthetic construct
  source 1..20: mol_type = other RNA
gctaactttctgatagttga

SEQ ID NO: 9609 - RNA, 20 nt, synthetic construct
  source 1..20: mol_type = other RNA
ctaactttctgatagttgat

SEQ ID NO: 9610 - RNA, 20 nt, synthetic construct
  source 1..20: mol_type = other RNA
accagctaactttctgatag

SEQ ID NO: 9611 - RNA, 20 nt, synthetic construct
  source 1..20: mol_type = other RNA
cagctaactttctgatagtt

SEQ ID NO: 9612 - RNA, 20 nt, synthetic construct
  source 1..20: mol_type = other RNA
agctaactttctgatagttg

SEQ ID NO: 9613 - RNA, 20 nt, synthetic construct
  source 1..20: mol_type = other RNA
gctataaaatatgtgaactt

SEQ ID NO: 9614 - RNA, 20 nt, synthetic construct
  source 1..20: mol_type = other RNA
ataaaatatgtgaacttaga

SEQ ID NO: 9615 - RNA, 20 nt, synthetic construct
  source 1..20: mol_type = other RNA
tgctataaaatatgtgaact

SEQ ID NO: 9616 - RNA, 20 nt, synthetic construct
  source 1..20: mol_type = other RNA
ctataaaatatgtgaactta

SEQ ID NO: 9617 - RNA, 20 nt, synthetic construct
  source 1..20: mol_type = other RNA
tataaaatatgtgaacttag

SEQ ID NO: 9618 - RNA, 20 nt, synthetic construct
  source 1..20: mol_type = other RNA
taaaatatgtgaacttagaa

SEQ ID NO: 9619 - RNA, 20 nt, synthetic construct
  source 1..20: mol_type = other RNA
aaaatatgtgaacttagaag

SEQ ID NO: 9620 - RNA, 20 nt, synthetic construct
  source 1..20: mol_type = other RNA
ttgacattagaccagaaaat

SEQ ID NO: 9621 - RNA, 20 nt, synthetic construct
  source 1..20: mol_type = other RNA
tttgacattagaccagaaaa

SEQ ID NO: 9622 - RNA, 20 nt, synthetic construct
  source 1..20: mol_type = other RNA
ctttgacattagaccagaaa

SEQ ID NO: 9623 - RNA, 20 nt, synthetic construct
  source 1..20: mol_type = other RNA
actttgacattagaccagaa

SEQ ID NO: 9624 - RNA, 20 nt, synthetic construct
  source 1..20: mol_type = other RNA
cactttgacattagaccaga

SEQ ID NO: 9625 - RNA, 20 nt, synthetic construct
  source 1..20: mol_type = other RNA
aaaatatcatttaccaaacc

SEQ ID NO: 9626 - RNA, 20 nt, synthetic construct
  source 1..20: mol_type = other RNA
gaaaatatcatttaccaaac

SEQ ID NO: 9627 - RNA, 20 nt, synthetic construct
  source 1..20: mol_type = other RNA
agaaaatatcatttaccaaa

SEQ ID NO: 9628 - RNA, 20 nt, synthetic construct
  source 1..20: mol_type = other RNA
cagaaaatatcatttaccaa

SEQ ID NO: 9629 - RNA, 20 nt, synthetic construct
  source 1..20: mol_type = other RNA
ccagaaaatatcatttacca

SEQ ID NO: 9630 - RNA, 20 nt, synthetic construct
  source 1..20: mol_type = other RNA
accagaaaatatcatttacc

SEQ ID NO: 9631 - RNA, 20 nt, synthetic construct
  source 1..20: mol_type = other RNA
caaatttgttaaagtcaaag

SEQ ID NO: 9632 - RNA, 20 nt, synthetic construct
  source 1..20: mol_type = other RNA
ccaaatttgttaaagtcaaa

SEQ ID NO: 9633 - RNA, 20 nt, synthetic construct
  source 1..20: mol_type = other RNA
gccaaatttgttaaagtcaa

SEQ ID NO: 9634 - RNA, 20 nt, synthetic construct
  source 1..20: mol_type = other RNA
ggccaaatttgttaaagtca

SEQ ID NO: 9635 - RNA, 20 nt, synthetic construct
  source 1..20: mol_type = other RNA
tggccaaatttgttaaagtc

SEQ ID NO: 9636 - RNA, 20 nt, synthetic construct
  source 1..20: mol_type = other RNA
atggccaaatttgttaaagt

SEQ ID NO: 9637 - RNA, 20 nt, synthetic construct
  source 1..20: mol_type = other RNA
catggccaaatttgttaaag

SEQ ID NO: 9638 - RNA, 20 nt, synthetic construct
  source 1..20: mol_type = other RNA
ttcagactttggaatgacaa

SEQ ID NO: 9639 - RNA, 20 nt, synthetic construct
  source 1..20: mol_type = other RNA
tttcagactttggaatgaca

SEQ ID NO: 9640 - RNA, 20 nt, synthetic construct
  source 1..20: mol_type = other RNA
cagactttggaatgacaagg

SEQ ID NO: 9641 - RNA, 20 nt, synthetic construct
  source 1..20: mol_type = other RNA
tcagactttggaatgacaag

SEQ ID NO: 9642 - RNA, 20 nt, synthetic construct
  source 1..20: mol_type = other RNA
atttcagactttggaatgac

SEQ ID NO: 9643 - RNA, 20 nt, synthetic construct
  source 1..20: mol_type = other RNA
tagggatttggtaagtatgg

SEQ ID NO: 9644 - RNA, 20 nt, synthetic construct
  source 1..20: mol_type = other RNA
catagggatttggtaagtat

SEQ ID NO: 9645 - RNA, 20 nt, synthetic construct
  source 1..20: mol_type = other RNA
gggatttggtaagtatggtg

SEQ ID NO: 9646 - RNA, 20 nt, synthetic construct
  source 1..20: mol_type = other RNA
agggatttggtaagtatggt

SEQ ID NO: 9647 - RNA, 20 nt, synthetic construct
  source 1..20: mol_type = other RNA
atagggatttggtaagtatg

SEQ ID NO: 9648 - RNA, 20 nt, synthetic construct
  source 1..20: mol_type = other RNA
ggaattgtttggtcagttca

SEQ ID NO: 9649 - RNA, 20 nt, synthetic construct
  source 1..20: mol_type = other RNA
aggaattgtttggtcagttc

SEQ ID NO: 9650 - RNA, 20 nt, synthetic construct
  source 1..20: mol_type = other RNA
aaggaattgtttggtcagtt

SEQ ID NO: 9651 - RNA, 20 nt, synthetic construct
  source 1..20: mol_type = other RNA
caaggaattgtttggtcagt

SEQ ID NO: 9652 - RNA, 20 nt, synthetic construct
  source 1..20: mol_type = other RNA
gcaaggaattgtttggtcag

SEQ ID NO: 9653 - RNA, 20 nt, synthetic construct
  source 1..20: mol_type = other RNA
ggcaaggaattgtttggtca

SEQ ID NO: 9654 - RNA, 20 nt, synthetic construct
  source 1..20: mol_type = other RNA
ctatcaaggccatcaatgaa

SEQ ID NO: 9655 - RNA, 20 nt, synthetic construct
  source 1..20: mol_type = other RNA
gctatcaaggccatcaatga

SEQ ID NO: 9656 - RNA, 20 nt, synthetic construct
  source 1..20: mol_type = other RNA
tcaaggccatcaatgaaggc

SEQ ID NO: 9657 - RNA, 20 nt, synthetic construct
  source 1..20: mol_type = other RNA
atcaaggccatcaatgaagg

SEQ ID NO: 9658 - RNA, 20 nt, synthetic construct
  source 1..20: mol_type = other RNA
tatcaaggccatcaatgaag

SEQ ID NO: 9659 - RNA, 20 nt, synthetic construct
  source 1..20: mol_type = other RNA
agctatcaaggccatcaatg

SEQ ID NO: 9660 - RNA, 20 nt, synthetic construct
  source 1..20: mol_type = other RNA
ggggactttggcctagccaa

SEQ ID NO: 9661 - RNA, 20 nt, synthetic construct
  source 1..20: mol_type = other RNA
cggggactttggcctagcca

SEQ ID NO: 9662 - RNA, 20 nt, synthetic construct
  source 1..20: mol_type = other RNA
gggactttggcctagccaag

SEQ ID NO: 9663 - RNA, 20 nt, synthetic construct
  source 1..20: mol_type = other RNA
tcggggactttggcctagcc

SEQ ID NO: 9664 - RNA, 20 nt, synthetic construct
  source 1..20: mol_type = other RNA
atcggggactttggcctagc

SEQ ID NO: 9665 - RNA, 20 nt, synthetic construct
  source 1..20: mol_type = other RNA
gtgatcctggcgtgggcctg

SEQ ID NO: 9666 - RNA, 20 nt, synthetic construct
  source 1..20: mol_type = other RNA
agtgatcctggcgtgggcct

SEQ ID NO: 9667 - RNA, 20 nt, synthetic construct
  source 1..20: mol_type = other RNA
gagtgatcctggcgtgggcc

SEQ ID NO: 9668 - RNA, 20 nt, synthetic construct
  source 1..20: mol_type = other RNA
tgagtgatcctggcgtgggc

SEQ ID NO: 9669 - RNA, 20 nt, synthetic construct
  source 1..20: mol_type = other RNA
ctgagtgatcctggcgtggg

SEQ ID NO: 9670 - RNA, 20 nt, synthetic construct
  source 1..20: mol_type = other RNA
cgagacctagccgcgcgcaa

SEQ ID NO: 9671 - RNA, 20 nt, synthetic construct
  source 1..20: mol_type = other RNA
gagacctagccgcgcgcaac

SEQ ID NO: 9672 - RNA, 20 nt, synthetic construct
  source 1..20: mol_type = other RNA
ccgagacctagccgcgcgca

SEQ ID NO: 9673 - RNA, 20 nt, synthetic construct
  source 1..20: mol_type = other RNA
accgagacctagccgcgcgc

SEQ ID NO: 9674 - RNA, 20 nt, synthetic construct
  source 1..20: mol_type = other RNA
caccgagacctagccgcgcg

SEQ ID NO: 9675 - RNA, 20 nt, synthetic construct
  source 1..20: mol_type = other RNA
cgcaacgtgctgctggacaa

SEQ ID NO: 9676 - RNA, 20 nt, synthetic construct
  source 1..20: mol_type = other RNA
gcaacgtgctgctggacaac

SEQ ID NO: 9677 - RNA, 20 nt, synthetic construct
  source 1..20: mol_type = other RNA
gcgcaacgtgctgctggaca

SEQ ID NO: 9678 - RNA, 20 nt, synthetic construct
  source 1..20: mol_type = other RNA
cgcgcaacgtgctgctggac

SEQ ID NO: 9679 - RNA, 20 nt, synthetic construct
  source 1..20: mol_type = other RNA
gcgcgcaacgtgctgctgga

SEQ ID NO: 9680 - RNA, 20 nt, synthetic construct
  source 1..20: mol_type = other RNA
cgcgcgcaacgtgctgctgg

SEQ ID NO: 9681 - RNA, 20 nt, synthetic construct
  source 1..20: mol_type = other RNA
ccggaacatcctgctggccc

SEQ ID NO: 9682 - RNA, 20 nt, synthetic construct
  source 1..20: mol_type = other RNA
gccggaacatcctgctggcc

SEQ ID NO: 9683 - RNA, 20 nt, synthetic construct
  source 1..20: mol_type = other RNA
ggaacatcctgctggcccgg

SEQ ID NO: 9684 - RNA, 20 nt, synthetic construct
  source 1..20: mol_type = other RNA
cggaacatcctgctggcccg

SEQ ID NO: 9685 - RNA, 20 nt, synthetic construct
  source 1..20: mol_type = other RNA
ggccggaacatcctgctggc

SEQ ID NO: 9686 - RNA, 20 nt, synthetic construct
  source 1..20: mol_type = other RNA
tggccggaacatcctgctgg

SEQ ID NO: 9687 - RNA, 20 nt, synthetic construct
  source 1..20: mol_type = other RNA
tgaaagccctcaaggcagac

SEQ ID NO: 9688 - RNA, 20 nt, synthetic construct
  source 1..20: mol_type = other RNA
gcggtgaaagccctcaaggc

SEQ ID NO: 9689 - RNA, 20 nt, synthetic construct
  source 1..20: mol_type = other RNA
gaaagccctcaaggcagact

SEQ ID NO: 9690 - RNA, 20 nt, synthetic construct
  source 1..20: mol_type = other RNA
gtgaaagccctcaaggcaga

SEQ ID NO: 9691 - RNA, 20 nt, synthetic construct
  source 1..20: mol_type = other RNA
ggtgaaagccctcaaggcag

SEQ ID NO: 9692 - RNA, 20 nt, synthetic construct
  source 1..20: mol_type = other RNA
cggtgaaagccctcaaggca

SEQ ID NO: 9693 - RNA, 20 nt, synthetic construct
  source 1..20: mol_type = other RNA
ggcggtgaaagccctcaagg

SEQ ID NO: 9694 - RNA, 20 nt, synthetic construct
  source 1..20: mol_type = other RNA
tgctcaaagtgctggaccct

SEQ ID NO: 9695 - RNA, 20 nt, synthetic construct
  source 1..20: mol_type = other RNA
caaagtgctggaccctagtc

SEQ ID NO: 9696 - RNA, 20 nt, synthetic construct
  source 1..20: mol_type = other RNA
tcaaagtgctggaccctagt

SEQ ID NO: 9697 - RNA, 20 nt, synthetic construct
  source 1..20: mol_type = other RNA
ctcaaagtgctggaccctag

SEQ ID NO: 9698 - RNA, 20 nt, synthetic construct
  source 1..20: mol_type = other RNA
gctcaaagtgctggacccta

SEQ ID NO: 9699 - RNA, 20 nt, synthetic construct
  source 1..20: mol_type = other RNA
gtgctcaaagtgctggaccc

SEQ ID NO: 9700 - RNA, 20 nt, synthetic construct
  source 1..20: mol_type = other RNA
ggtgctcaaagtgctggacc

SEQ ID NO: 9701 - RNA, 20 nt, synthetic construct
  source 1..20: mol_type = other RNA
tggctgacttcggactctcc

SEQ ID NO: 9702 - RNA, 20 nt, synthetic construct
  source 1..20: mol_type = other RNA
ggctgacttcggactctccc

SEQ ID NO: 9703 - RNA, 20 nt, synthetic construct
  source 1..20: mol_type = other RNA
gtggctgacttcggactctc

SEQ ID NO: 9704 - RNA, 20 nt, synthetic construct
  source 1..20: mol_type = other RNA
gctgacttcggactctcccg

SEQ ID NO: 9705 - RNA, 20 nt, synthetic construct
  source 1..20: mol_type = other RNA
ctgacttcggactctcccgg

SEQ ID NO: 9706 - RNA, 20 nt, synthetic construct
  source 1..20: mol_type = other RNA
gagacctggctgctcggaat

SEQ ID NO: 9707 - RNA, 20 nt, synthetic construct
  source 1..20: mol_type = other RNA
accgagacctggctgctcgg

SEQ ID NO: 9708 - RNA, 20 nt, synthetic construct
  source 1..20: mol_type = other RNA
ccgagacctggctgctcgga

SEQ ID NO: 9709 - RNA, 20 nt, synthetic construct
  source 1..20: mol_type = other RNA
cgagacctggctgctcggaa

SEQ ID NO: 9710 - RNA, 20 nt, synthetic construct
  source 1..20: mol_type = other RNA
caccgagacctggctgctcg

SEQ ID NO: 9711 - RNA, 20 nt, synthetic construct
  source 1..20: mol_type = other RNA
ggaattgcatgtacgaattc

SEQ ID NO: 9712 - RNA, 20 nt, synthetic construct
  source 1..20: mol_type = other RNA
tgctcggaattgcatgtacg

SEQ ID NO: 9713 - RNA, 20 nt, synthetic construct
  source 1..20: mol_type = other RNA
gctcggaattgcatgtacga

SEQ ID NO: 9714 - RNA, 20 nt, synthetic construct
  source 1..20: mol_type = other RNA
ctcggaattgcatgtacgaa

SEQ ID NO: 9715 - RNA, 20 nt, synthetic construct
  source 1..20: mol_type = other RNA
tcggaattgcatgtacgaat

SEQ ID NO: 9716 - RNA, 20 nt, synthetic construct
  source 1..20: mol_type = other RNA
cggaattgcatgtacgaatt

SEQ ID NO: 9717 - RNA, 20 nt, synthetic construct
  source 1..20: mol_type = other RNA
gctgtgaagatgctgaaagg

SEQ ID NO: 9718 - RNA, 20 nt, synthetic construct
  source 1..20: mol_type = other RNA
tgtgaagatgctgaaaggtg

SEQ ID NO: 9719 - RNA, 20 nt, synthetic construct
  source 1..20: mol_type = other RNA
ggctgtgaagatgctgaaag

SEQ ID NO: 9720 - RNA, 20 nt, synthetic construct
  source 1..20: mol_type = other RNA
ctgtgaagatgctgaaaggt

SEQ ID NO: 9721 - RNA, 20 nt, synthetic construct
  source 1..20: mol_type = other RNA
ctcattgactttggacttag

SEQ ID NO: 9722 - RNA, 20 nt, synthetic construct
  source 1..20: mol_type = other RNA
tcattgactttggacttagc

SEQ ID NO: 9723 - RNA, 20 nt, synthetic construct
  source 1..20: mol_type = other RNA
cattgactttggacttagct

SEQ ID NO: 9724 - RNA, 20 nt, synthetic construct
  source 1..20: mol_type = other RNA
attgactttggacttagctt

SEQ ID NO: 9725 - RNA, 20 nt, synthetic construct
  source 1..20: mol_type = other RNA
ttgactttggacttagcttc

SEQ ID NO: 9726 - RNA, 20 nt, synthetic construct
  source 1..20: mol_type = other RNA
catgcggacctcaaaccacg

SEQ ID NO: 9727 - RNA, 20 nt, synthetic construct
  source 1..20: mol_type = other RNA
atgcggacctcaaaccacgt

SEQ ID NO: 9728 - RNA, 20 nt, synthetic construct
  source 1..20: mol_type = other RNA
tgcggacctcaaaccacgta

SEQ ID NO: 9729 - RNA, 20 nt, synthetic construct
  source 1..20: mol_type = other RNA
gcggacctcaaaccacgtaa

SEQ ID NO: 9730 - RNA, 20 nt, synthetic construct
  source 1..20: mol_type = other RNA
cggacctcaaaccacgtaac

SEQ ID NO: 9731 - RNA, 20 nt, synthetic construct
  source 1..20: mol_type = other RNA
ccacgtaacatattgtggag

SEQ ID NO: 9732 - RNA, 20 nt, synthetic construct
  source 1..20: mol_type = other RNA
cgtaacatattgtggagtgc

SEQ ID NO: 9733 - RNA, 20 nt, synthetic construct
  source 1..20: mol_type = other RNA
accacgtaacatattgtgga

SEQ ID NO: 9734 - RNA, 20 nt, synthetic construct
  source 1..20: mol_type = other RNA
cacgtaacatattgtggagt

SEQ ID NO: 9735 - RNA, 20 nt, synthetic construct
  source 1..20: mol_type = other RNA
acgtaacatattgtggagtg

SEQ ID NO: 9736 - RNA, 20 nt, synthetic construct
  source 1..20: mol_type = other RNA
gtaacatattgtggagtgca

SEQ ID NO: 9737 - RNA, 20 nt, synthetic construct
  source 1..20: mol_type = other RNA
cgccctcaagcagttcttgc

SEQ ID NO: 9738 - RNA, 20 nt, synthetic construct
  source 1..20: mol_type = other RNA
ctcaagcagttcttgccgcc

SEQ ID NO: 9739 - RNA, 20 nt, synthetic construct
  source 1..20: mol_type = other RNA
tcaagcagttcttgccgcca

SEQ ID NO: 9740 - RNA, 20 nt, synthetic construct
  source 1..20: mol_type = other RNA
gccctcaagcagttcttgcc

SEQ ID NO: 9741 - RNA, 20 nt, synthetic construct
  source 1..20: mol_type = other RNA
ccctcaagcagttcttgccg

SEQ ID NO: 9742 - RNA, 20 nt, synthetic construct
  source 1..20: mol_type = other RNA
cctcaagcagttcttgccgc

SEQ ID NO: 9743 - RNA, 20 nt, synthetic construct
  source 1..20: mol_type = other RNA
cagctgacttcggcttcgcg

SEQ ID NO: 9744 - RNA, 20 nt, synthetic construct
  source 1..20: mol_type = other RNA
agctgacttcggcttcgcgc

SEQ ID NO: 9745 - RNA, 20 nt, synthetic construct
  source 1..20: mol_type = other RNA
gcagctgacttcggcttcgc

SEQ ID NO: 9746 - RNA, 20 nt, synthetic construct
  source 1..20: mol_type = other RNA
gctgacttcggcttcgcgcg

SEQ ID NO: 9747 - RNA, 20 nt, synthetic construct
  source 1..20: mol_type = other RNA
ctgacttcggcttcgcgcgg

SEQ ID NO: 9748 - RNA, 20 nt, synthetic construct
  source 1..20: mol_type = other RNA
caccgcgacctgaaaccgca

SEQ ID NO: 9749 - RNA, 20 nt, synthetic construct
  source 1..20: mol_type = other RNA
accgcgacctgaaaccgcag

SEQ ID NO: 9750 - RNA, 20 nt, synthetic construct
  source 1..20: mol_type = other RNA
ccgcgacctgaaaccgcaga

SEQ ID NO: 9751 - RNA, 20 nt, synthetic construct
  source 1..20: mol_type = other RNA
cgcgacctgaaaccgcagaa

SEQ ID NO: 9752 - RNA, 20 nt, synthetic construct
  source 1..20: mol_type = other RNA
gcgacctgaaaccgcagaac

SEQ ID NO: 9753 - RNA, 20 nt, synthetic construct
  source 1..20: mol_type = other RNA
accgcagaacatcctgctgt

SEQ ID NO: 9754 - RNA, 20 nt, synthetic construct
  source 1..20: mol_type = other RNA
ccgcagaacatcctgctgtc

SEQ ID NO: 9755 - RNA, 20 nt, synthetic construct
  source 1..20: mol_type = other RNA
cgcagaacatcctgctgtcc

SEQ ID NO: 9756 - RNA, 20 nt, synthetic construct
  source 1..20: mol_type = other RNA
gcagaacatcctgctgtcca

SEQ ID NO: 9757 - RNA, 20 nt, synthetic construct
  source 1..20: mol_type = other RNA
cagaacatcctgctgtccaa

SEQ ID NO: 9758 - RNA, 20 nt, synthetic construct
  source 1..20: mol_type = other RNA
agaacatcctgctgtccaac

SEQ ID NO: 9759 - RNA, 20 nt, synthetic construct
  source 1..20: mol_type = other RNA
cgccgtcaagtgcattaaca

SEQ ID NO: 9760 - RNA, 20 nt, synthetic construct
  source 1..20: mol_type = other RNA
cgtcaagtgcattaacaaga

SEQ ID NO: 9761 - RNA, 20 nt, synthetic construct
  source 1..20: mol_type = other RNA
gccgtcaagtgcattaacaa

SEQ ID NO: 9762 - RNA, 20 nt, synthetic construct
  source 1..20: mol_type = other RNA
ccgtcaagtgcattaacaag

SEQ ID NO: 9763 - RNA, 20 nt, synthetic construct
  source 1..20: mol_type = other RNA
gtcaagtgcattaacaagaa

SEQ ID NO: 9764 - RNA, 20 nt, synthetic construct
  source 1..20: mol_type = other RNA
tcaagtgcattaacaagaag

SEQ ID NO: 9765 - RNA, 20 nt, synthetic construct
  source 1..20: mol_type = other RNA
gagatctcaaaccacagaac

SEQ ID NO: 9766 - RNA, 20 nt, synthetic construct
  source 1..20: mol_type = other RNA
agagatctcaaaccacagaa

SEQ ID NO: 9767 - RNA, 20 nt, synthetic construct
  source 1..20: mol_type = other RNA
cagagatctcaaaccacaga

SEQ ID NO: 9768 - RNA, 20 nt, synthetic construct
  source 1..20: mol_type = other RNA
acagagatctcaaaccacag

SEQ ID NO: 9769 - RNA, 20 nt, synthetic construct
  source 1..20: mol_type = other RNA
cacagagatctcaaaccaca

SEQ ID NO: 9770 - RNA, 20 nt, synthetic construct
  source 1..20: mol_type = other RNA
cagaacatcttgctgtccta

SEQ ID NO: 9771 - RNA, 20 nt, synthetic construct
  source 1..20: mol_type = other RNA
agaacatcttgctgtcctat

SEQ ID NO: 9772 - RNA, 20 nt, synthetic construct
  source 1..20: mol_type = other RNA
acagaacatcttgctgtcct

SEQ ID NO: 9773 - RNA, 20 nt, synthetic construct
  source 1..20: mol_type = other RNA
cacagaacatcttgctgtcc

SEQ ID NO: 9774 - RNA, 20 nt, synthetic construct
  source 1..20: mol_type = other RNA
ccacagaacatcttgctgtc

SEQ ID NO: 9775 - RNA, 20 nt, synthetic construct
  source 1..20: mol_type = other RNA
accacagaacatcttgctgt

SEQ ID NO: 9776 - RNA, 20 nt, synthetic construct
  source 1..20: mol_type = other RNA
tattaaaagtattaataaaa

SEQ ID NO: 9777 - RNA, 20 nt, synthetic construct
  source 1..20: mol_type = other RNA
ctattaaaagtattaataaa

SEQ ID NO: 9778 - RNA, 20 nt, synthetic construct
  source 1..20: mol_type = other RNA
gctattaaaagtattaataa

SEQ ID NO: 9779 - RNA, 20 nt, synthetic construct
  source 1..20: mol_type = other RNA
agctattaaaagtattaata

SEQ ID NO: 9780 - RNA, 20 nt, synthetic construct
  source 1..20: mol_type = other RNA
cagactttggtttcgcacaa

SEQ ID NO: 9781 - RNA, 20 nt, synthetic construct
  source 1..20: mol_type = other RNA
gcagactttggtttcgcaca

SEQ ID NO: 9782 - RNA, 20 nt, synthetic construct
  source 1..20: mol_type = other RNA
tgcagactttggtttcgcac

SEQ ID NO: 9783 - RNA, 20 nt, synthetic construct
  source 1..20: mol_type = other RNA
ctgcagactttggtttcgca

SEQ ID NO: 9784 - RNA, 20 nt, synthetic construct
  source 1..20: mol_type = other RNA
cctgcagactttggtttcgc

SEQ ID NO: 9785 - RNA, 20 nt, synthetic construct
  source 1..20: mol_type = other RNA
tggatctgaagccacagaac

SEQ ID NO: 9786 - RNA, 20 nt, synthetic construct
  source 1..20: mol_type = other RNA
ctggatctgaagccacagaa

SEQ ID NO: 9787 - RNA, 20 nt, synthetic construct
  source 1..20: mol_type = other RNA
cctggatctgaagccacaga

SEQ ID NO: 9788 - RNA, 20 nt, synthetic construct
  source 1..20: mol_type = other RNA
acctggatctgaagccacag

SEQ ID NO: 9789 - RNA, 20 nt, synthetic construct
  source 1..20: mol_type = other RNA
cacctggatctgaagccaca

SEQ ID NO: 9790 - RNA, 20 nt, synthetic construct
  source 1..20: mol_type = other RNA
agaacattctactgagctcc

SEQ ID NO: 9791 - RNA, 20 nt, synthetic construct
  source 1..20: mol_type = other RNA
cagaacattctactgagctc

SEQ ID NO: 9792 - RNA, 20 nt, synthetic construct
  source 1..20: mol_type = other RNA
acagaacattctactgagct

SEQ ID NO: 9793 - RNA, 20 nt, synthetic construct
  source 1..20: mol_type = other RNA
cacagaacattctactgagc

SEQ ID NO: 9794 - RNA, 20 nt, synthetic construct
  source 1..20: mol_type = other RNA
ccacagaacattctactgag

SEQ ID NO: 9795 - RNA, 20 nt, synthetic construct
  source 1..20: mol_type = other RNA
gccacagaacattctactga

SEQ ID NO: 9796 - RNA, 20 nt, synthetic construct
  source 1..20: mol_type = other RNA
taaagtgtgtagccaagaaa

SEQ ID NO: 9797 - RNA, 20 nt, synthetic construct
  source 1..20: mol_type = other RNA
agccataaagtgtgtagcca

SEQ ID NO: 9798 - RNA, 20 nt, synthetic construct
  source 1..20: mol_type = other RNA
ataaagtgtgtagccaagaa

SEQ ID NO: 9799 - RNA, 20 nt, synthetic construct
  source 1..20: mol_type = other RNA
cataaagtgtgtagccaaga

SEQ ID NO: 9800 - RNA, 20 nt, synthetic construct
  source 1..20: mol_type = other RNA
ccataaagtgtgtagccaag

SEQ ID NO: 9801 - RNA, 20 nt, synthetic construct
  source 1..20: mol_type = other RNA
gccataaagtgtgtagccaa

SEQ ID NO: 9802 - RNA, 20 nt, synthetic construct
  source 1..20: mol_type = other RNA
tgtgacatttctcctaggaa

SEQ ID NO: 9803 - RNA, 20 nt, synthetic construct
  source 1..20: mol_type = other RNA
ttgtgacatttctcctagga

SEQ ID NO: 9804 - RNA, 20 nt, synthetic construct
  source 1..20: mol_type = other RNA
gtgacatttctcctaggaag

SEQ ID NO: 9805 - RNA, 20 nt, synthetic construct
  source 1..20: mol_type = other RNA
tttgtgacatttctcctagg

SEQ ID NO: 9806 - RNA, 20 nt, synthetic construct
  source 1..20: mol_type = other RNA
tagattatggccttgcttat

SEQ ID NO: 9807 - RNA, 20 nt, synthetic construct
  source 1..20: mol_type = other RNA
ttggtagattatggccttgc

SEQ ID NO: 9808 - RNA, 20 nt, synthetic construct
  source 1..20: mol_type = other RNA
tggtagattatggccttgct

SEQ ID NO: 9809 - RNA, 20 nt, synthetic construct
  source 1..20: mol_type = other RNA
ggtagattatggccttgctt

SEQ ID NO: 9810 - RNA, 20 nt, synthetic construct
  source 1..20: mol_type = other RNA
gtagattatggccttgctta

SEQ ID NO: 9811 - RNA, 20 nt, synthetic construct
  source 1..20: mol_type = other RNA
catggagatatcaaggcctc

SEQ ID NO: 9812 - RNA, 20 nt, synthetic construct
  source 1..20: mol_type = other RNA
atggagatatcaaggcctca

SEQ ID NO: 9813 - RNA, 20 nt, synthetic construct
  source 1..20: mol_type = other RNA
tggagatatcaaggcctcaa

SEQ ID NO: 9814 - RNA, 20 nt, synthetic construct
  source 1..20: mol_type = other RNA
ggagatatcaaggcctcaaa

SEQ ID NO: 9815 - RNA, 20 nt, synthetic construct
  source 1..20: mol_type = other RNA
gagatatcaaggcctcaaat

SEQ ID NO: 9816 - RNA, 20 nt, synthetic construct
  source 1..20: mol_type = other RNA
ggcctcaaatcttcttctga

SEQ ID NO: 9817 - RNA, 20 nt, synthetic construct
  source 1..20: mol_type = other RNA
gcctcaaatcttcttctgaa

SEQ ID NO: 9818 - RNA, 20 nt, synthetic construct
  source 1..20: mol_type = other RNA
cctcaaatcttcttctgaac

SEQ ID NO: 9819 - RNA, 20 nt, synthetic construct
  source 1..20: mol_type = other RNA
ctcaaatcttcttctgaact

SEQ ID NO: 9820 - RNA, 20 nt, synthetic construct
  source 1..20: mol_type = other RNA
tcaaatcttcttctgaacta

SEQ ID NO: 9821 - RNA, 20 nt, synthetic construct
  source 1..20: mol_type = other RNA
caaatcttcttctgaactac

SEQ ID NO: 9822 - RNA, 20 nt, synthetic construct
  source 1..20: mol_type = other RNA
tgttgtaaaagtggtaagaa

SEQ ID NO: 9823 - RNA, 20 nt, synthetic construct
  source 1..20: mol_type = other RNA
gttgtaaaagtggtaagaaa

SEQ ID NO: 9824 - RNA, 20 nt, synthetic construct
  source 1..20: mol_type = other RNA
ttgtaaaagtggtaagaaat

SEQ ID NO: 9825 - RNA, 20 nt, synthetic construct
  source 1..20: mol_type = other RNA
tgtaaaagtggtaagaaata

SEQ ID NO: 9826 - RNA, 20 nt, synthetic construct
  source 1..20: mol_type = other RNA
gtaaaagtggtaagaaatat

SEQ ID NO: 9827 - RNA, 20 nt, synthetic construct
  source 1..20: mol_type = other RNA
taaaagtggtaagaaatatt

SEQ ID NO: 9828 - RNA, 20 nt, synthetic construct
  source 1..20: mol_type = other RNA
aaaagtggtaagaaatattt

SEQ ID NO: 9829 - RNA, 20 nt, synthetic construct
  source 1..20: mol_type = other RNA
cagattatggactttcctac

SEQ ID NO: 9830 - RNA, 20 nt, synthetic construct
  source 1..20: mol_type = other RNA
cttgcagattatggactttc

SEQ ID NO: 9831 - RNA, 20 nt, synthetic construct
  source 1..20: mol_type = other RNA
ttgcagattatggactttcc

SEQ ID NO: 9832 - RNA, 20 nt, synthetic construct
  source 1..20: mol_type = other RNA
tgcagattatggactttcct

SEQ ID NO: 9833 - RNA, 20 nt, synthetic construct
  source 1..20: mol_type = other RNA
gcagattatggactttccta

SEQ ID NO: 9834 - RNA, 20 nt, synthetic construct
  source 1..20: mol_type = other RNA
catggtgatataaaagcagc

SEQ ID NO: 9835 - RNA, 20 nt, synthetic construct
  source 1..20: mol_type = other RNA
atggtgatataaaagcagca

SEQ ID NO: 9836 - RNA, 20 nt, synthetic construct
  source 1..20: mol_type = other RNA
tggtgatataaaagcagcaa

SEQ ID NO: 9837 - RNA, 20 nt, synthetic construct
  source 1..20: mol_type = other RNA
ggtgatataaaagcagcaaa

SEQ ID NO: 9838 - RNA, 20 nt, synthetic construct
  source 1..20: mol_type = other RNA
gtgatataaaagcagcaaat

SEQ ID NO: 9839 - RNA, 20 nt, synthetic construct
  source 1..20: mol_type = other RNA
gtagtaaaagtggtaagtgt

SEQ ID NO: 9840 - RNA, 20 nt, synthetic construct
  source 1..20: mol_type = other RNA
tgtagtaaaagtggtaagtg

SEQ ID NO: 9841 - RNA, 20 nt, synthetic construct
  source 1..20: mol_type = other RNA
tagtaaaagtggtaagtgtt

SEQ ID NO: 9842 - RNA, 20 nt, synthetic construct
  source 1..20: mol_type = other RNA
agtaaaagtggtaagtgttg

SEQ ID NO: 9843 - RNA, 20 nt, synthetic construct
  source 1..20: mol_type = other RNA
gtaaaagtggtaagtgttgc

SEQ ID NO: 9844 - RNA, 20 nt, synthetic construct
  source 1..20: mol_type = other RNA
taaaagtggtaagtgttgct

SEQ ID NO: 9845 - RNA, 20 nt, synthetic construct
  source 1..20: mol_type = other RNA
aaaagtggtaagtgttgctc

SEQ ID NO: 9846 - RNA, 20 nt, synthetic construct
  source 1..20: mol_type = other RNA
gaaaatatctttgtggatcc

SEQ ID NO: 9847 - RNA, 20 nt, synthetic construct
  source 1..20: mol_type = other RNA
aaaatatctttgtggatcca

SEQ ID NO: 9848 - RNA, 20 nt, synthetic construct
  source 1..20: mol_type = other RNA
tgaaaatatctttgtggatc

SEQ ID NO: 9849 - RNA, 20 nt, synthetic construct
  source 1..20: mol_type = other RNA
ctgaaaatatctttgtggat

SEQ ID NO: 9850 - RNA, 20 nt, synthetic construct
  source 1..20: mol_type = other RNA
gctgaaaatatctttgtgga

SEQ ID NO: 9851 - RNA, 20 nt, synthetic construct
  source 1..20: mol_type = other RNA
agctgaaaatatctttgtgg

SEQ ID NO: 9852 - RNA, 20 nt, synthetic construct
  source 1..20: mol_type = other RNA
ctcaaactggtaagtgaccc

SEQ ID NO: 9853 - RNA, 20 nt, synthetic construct
  source 1..20: mol_type = other RNA
caaactggtaagtgaccctg

SEQ ID NO: 9854 - RNA, 20 nt, synthetic construct
  source 1..20: mol_type = other RNA
tcaaactggtaagtgaccct

SEQ ID NO: 9855 - RNA, 20 nt, synthetic construct
  source 1..20: mol_type = other RNA
actcaaactggtaagtgacc

SEQ ID NO: 9856 - RNA, 20 nt, synthetic construct
  source 1..20: mol_type = other RNA
cactcaaactggtaagtgac

SEQ ID NO: 9857 - RNA, 20 nt, synthetic construct
  source 1..20: mol_type = other RNA
tcactcaaactggtaagtga

SEQ ID NO: 9858 - RNA, 20 nt, synthetic construct
  source 1..20: mol_type = other RNA
ctcactcaaactggtaagtg

SEQ ID NO: 9859 - RNA, 20 nt, synthetic construct
  source 1..20: mol_type = other RNA
gtgatcttgggcatgtaaca

SEQ ID NO: 9860 - RNA, 20 nt, synthetic construct
  source 1..20: mol_type = other RNA
ctaggtgatcttgggcatgt

SEQ ID NO: 9861 - RNA, 20 nt, synthetic construct
  source 1..20: mol_type = other RNA
taggtgatcttgggcatgta

SEQ ID NO: 9862 - RNA, 20 nt, synthetic construct
  source 1..20: mol_type = other RNA
aggtgatcttgggcatgtaa

SEQ ID NO: 9863 - RNA, 20 nt, synthetic construct
  source 1..20: mol_type = other RNA
ggtgatcttgggcatgtaac

SEQ ID NO: 9864 - RNA, 20 nt, synthetic construct
  source 1..20: mol_type = other RNA
catggatataaaacctagta

SEQ ID NO: 9865 - RNA, 20 nt, synthetic construct
  source 1..20: mol_type = other RNA
cacatggatataaaacctag

SEQ ID NO: 9866 - RNA, 20 nt, synthetic construct
  source 1..20: mol_type = other RNA
acatggatataaaacctagt

SEQ ID NO: 9867 - RNA, 20 nt, synthetic construct
  source 1..20: mol_type = other RNA
atggatataaaacctagtaa

SEQ ID NO: 9868 - RNA, 20 nt, synthetic construct
  source 1..20: mol_type = other RNA
tggatataaaacctagtaag

SEQ ID NO: 9869 - RNA, 20 nt, synthetic construct
  source 1..20: mol_type = other RNA
ttaggtgacctgggccacgc

SEQ ID NO: 9870 - RNA, 20 nt, synthetic construct
  source 1..20: mol_type = other RNA
taggtgacctgggccacgca

SEQ ID NO: 9871 - RNA, 20 nt, synthetic construct
  source 1..20: mol_type = other RNA
aggtgacctgggccacgcaa

SEQ ID NO: 9872 - RNA, 20 nt, synthetic construct
  source 1..20: mol_type = other RNA
ggtgacctgggccacgcaac

SEQ ID NO: 9873 - RNA, 20 nt, synthetic construct
  source 1..20: mol_type = other RNA
gtgacctgggccacgcaaca

SEQ ID NO: 9874 - RNA, 20 nt, synthetic construct
  source 1..20: mol_type = other RNA
cctggacatcaaacctagtc

SEQ ID NO: 9875 - RNA, 20 nt, synthetic construct
  source 1..20: mol_type = other RNA
tggacatcaaacctagtcag

SEQ ID NO: 9876 - RNA, 20 nt, synthetic construct
  source 1..20: mol_type = other RNA
cacctggacatcaaacctag

SEQ ID NO: 9877 - RNA, 20 nt, synthetic construct
  source 1..20: mol_type = other RNA
acctggacatcaaacctagt

SEQ ID NO: 9878 - RNA, 20 nt, synthetic construct
  source 1..20: mol_type = other RNA
ctggacatcaaacctagtca

SEQ ID NO: 9879 - RNA, 20 nt, synthetic construct
  source 1..20: mol_type = other RNA
ttcaggtaatatattcattt

SEQ ID NO: 9880 - RNA, 20 nt, synthetic construct
  source 1..20: mol_type = other RNA
tcaggtaatatattcatttg

SEQ ID NO: 9881 - RNA, 20 nt, synthetic construct
  source 1..20: mol_type = other RNA
caggtaatatattcatttgt

SEQ ID NO: 9882 - RNA, 20 nt, synthetic construct
  source 1..20: mol_type = other RNA
aggtaatatattcatttgtc

SEQ ID NO: 9883 - RNA, 20 nt, synthetic construct
  source 1..20: mol_type = other RNA
ggtaatatattcatttgtca

SEQ ID NO: 9884 - RNA, 20 nt, synthetic construct
  source 1..20: mol_type = other RNA
gtaatatattcatttgtcac

SEQ ID NO: 9885 - RNA, 20 nt, synthetic construct
  source 1..20: mol_type = other RNA
tgcaataaagcgctctatga

SEQ ID NO: 9886 - RNA, 20 nt, synthetic construct
  source 1..20: mol_type = other RNA
gcaataaagcgctctatgaa

SEQ ID NO: 9887 - RNA, 20 nt, synthetic construct
  source 1..20: mol_type = other RNA
caataaagcgctctatgaaa

SEQ ID NO: 9888 - RNA, 20 nt, synthetic construct
  source 1..20: mol_type = other RNA
aataaagcgctctatgaaaa

SEQ ID NO: 9889 - RNA, 20 nt, synthetic construct
  source 1..20: mol_type = other RNA
ataaagcgctctatgaaaac

SEQ ID NO: 9890 - RNA, 20 nt, synthetic construct
  source 1..20: mol_type = other RNA
taaagcgctctatgaaaact

SEQ ID NO: 9891 - RNA, 20 nt, synthetic construct
  source 1..20: mol_type = other RNA
attggagacctcggtctggc

SEQ ID NO: 9892 - RNA, 20 nt, synthetic construct
  source 1..20: mol_type = other RNA
ttggagacctcggtctggca

SEQ ID NO: 9893 - RNA, 20 nt, synthetic construct
  source 1..20: mol_type = other RNA
tggagacctcggtctggcaa

SEQ ID NO: 9894 - RNA, 20 nt, synthetic construct
  source 1..20: mol_type = other RNA
ggagacctcggtctggcaac

SEQ ID NO: 9895 - RNA, 20 nt, synthetic construct
  source 1..20: mol_type = other RNA
gagacctcggtctggcaacc

SEQ ID NO: 9896 - RNA, 20 nt, synthetic construct
  source 1..20: mol_type = other RNA
caccgcgatcttaaatgtga

SEQ ID NO: 9897 - RNA, 20 nt, synthetic construct
  source 1..20: mol_type = other RNA
accgcgatcttaaatgtgac

SEQ ID NO: 9898 - RNA, 20 nt, synthetic construct
  source 1..20: mol_type = other RNA
ccgcgatcttaaatgtgaca

SEQ ID NO: 9899 - RNA, 20 nt, synthetic construct
  source 1..20: mol_type = other RNA
cgcgatcttaaatgtgacaa

SEQ ID NO: 9900 - RNA, 20 nt, synthetic construct
  source 1..20: mol_type = other RNA
gcgatcttaaatgtgacaac

SEQ ID NO: 9901 - RNA, 20 nt, synthetic construct
  source 1..20: mol_type = other RNA
tgtgacaacatctttatcac

SEQ ID NO: 9902 - RNA, 20 nt, synthetic construct
  source 1..20: mol_type = other RNA
gtgacaacatctttatcacc

SEQ ID NO: 9903 - RNA, 20 nt, synthetic construct
  source 1..20: mol_type = other RNA
atgtgacaacatctttatca

SEQ ID NO: 9904 - RNA, 20 nt, synthetic construct
  source 1..20: mol_type = other RNA
tgacaacatctttatcaccg

SEQ ID NO: 9905 - RNA, 20 nt, synthetic construct
  source 1..20: mol_type = other RNA
gacaacatctttatcaccgg

SEQ ID NO: 9906 - RNA, 20 nt, synthetic construct
  source 1..20: mol_type = other RNA
acaacatctttatcaccggc

SEQ ID NO: 9907 - RNA, 20 nt, synthetic construct
  source 1..20: mol_type = other RNA
tcctttaagacggtctacaa

SEQ ID NO: 9908 - RNA, 20 nt, synthetic construct
  source 1..20: mol_type = other RNA
cctttaagacggtctacaaa

SEQ ID NO: 9909 - RNA, 20 nt, synthetic construct
  source 1..20: mol_type = other RNA
ctcctttaagacggtctaca

SEQ ID NO: 9910 - RNA, 20 nt, synthetic construct
  source 1..20: mol_type = other RNA
ctttaagacggtctacaaag

SEQ ID NO: 9911 - RNA, 20 nt, synthetic construct
  source 1..20: mol_type = other RNA
tttaagacggtctacaaagg

SEQ ID NO: 9912 - RNA, 20 nt, synthetic construct
  source 1..20: mol_type = other RNA
ttaagacggtctacaaaggt

SEQ ID NO: 9913 - RNA, 20 nt, synthetic construct
  source 1..20: mol_type = other RNA
attggcgacttgggcctggc

SEQ ID NO: 9914 - RNA, 20 nt, synthetic construct
  source 1..20: mol_type = other RNA
ttggcgacttgggcctggcc

SEQ ID NO: 9915 - RNA, 20 nt, synthetic construct
  source 1..20: mol_type = other RNA
tggcgacttgggcctggcca

SEQ ID NO: 9916 - RNA, 20 nt, synthetic construct
  source 1..20: mol_type = other RNA
ggcgacttgggcctggccac

SEQ ID NO: 9917 - RNA, 20 nt, synthetic construct
  source 1..20: mol_type = other RNA
gcgacttgggcctggccact

SEQ ID NO: 9918 - RNA, 20 nt, synthetic construct
  source 1..20: mol_type = other RNA
caccgagacctgaaatgtga

SEQ ID NO: 9919 - RNA, 20 nt, synthetic construct
  source 1..20: mol_type = other RNA
accgagacctgaaatgtgac

SEQ ID NO: 9920 - RNA, 20 nt, synthetic construct
  source 1..20: mol_type = other RNA
ccgagacctgaaatgtgaca

SEQ ID NO: 9921 - RNA, 20 nt, synthetic construct
  source 1..20: mol_type = other RNA
cgagacctgaaatgtgacaa

SEQ ID NO: 9922 - RNA, 20 nt, synthetic construct
  source 1..20: mol_type = other RNA
gagacctgaaatgtgacaat

SEQ ID NO: 9923 - RNA, 20 nt, synthetic construct
  source 1..20: mol_type = other RNA
ttccttcaagacggtctaca

SEQ ID NO: 9924 - RNA, 20 nt, synthetic construct
  source 1..20: mol_type = other RNA
tccttcaagacggtctacaa

SEQ ID NO: 9925 - RNA, 20 nt, synthetic construct
  source 1..20: mol_type = other RNA
ccttcaagacggtctacaag

SEQ ID NO: 9926 - RNA, 20 nt, synthetic construct
  source 1..20: mol_type = other RNA
cttcaagacggtctacaagg

SEQ ID NO: 9927 - RNA, 20 nt, synthetic construct
  source 1..20: mol_type = other RNA
ttcaagacggtctacaaggg

SEQ ID NO: 9928 - RNA, 20 nt, synthetic construct
  source 1..20: mol_type = other RNA
tcaagacggtctacaagggg

SEQ ID NO: 9929 - RNA, 20 nt, synthetic construct
  source 1..20: mol_type = other RNA
gtgatctaggattagccacc

SEQ ID NO: 9930 - RNA, 20 nt, synthetic construct
  source 1..20: mol_type = other RNA
ggtgatctaggattagccac

SEQ ID NO: 9931 - RNA, 20 nt, synthetic construct
  source 1..20: mol_type = other RNA
tggtgatctaggattagcca

SEQ ID NO: 9932 - RNA, 20 nt, synthetic construct
  source 1..20: mol_type = other RNA
ttggtgatctaggattagcc

SEQ ID NO: 9933 - RNA, 20 nt, synthetic construct
  source 1..20: mol_type = other RNA
attggtgatctaggattagc

SEQ ID NO: 9934 - RNA, 20 nt, synthetic construct
  source 1..20: mol_type = other RNA
gggatctgaagtgtgacaat

SEQ ID NO: 9935 - RNA, 20 nt, synthetic construct
  source 1..20: mol_type = other RNA
cgggatctgaagtgtgacaa

SEQ ID NO: 9936 - RNA, 20 nt, synthetic construct
  source 1..20: mol_type = other RNA
ccgggatctgaagtgtgaca

SEQ ID NO: 9937 - RNA, 20 nt, synthetic construct
  source 1..20: mol_type = other RNA
accgggatctgaagtgtgac

SEQ ID NO: 9938 - RNA, 20 nt, synthetic construct
  source 1..20: mol_type = other RNA
caccgggatctgaagtgtga

SEQ ID NO: 9939 - RNA, 20 nt, synthetic construct
  source 1..20: mol_type = other RNA
taaaacagtatataaaggac

SEQ ID NO: 9940 - RNA, 20 nt, synthetic construct
  source 1..20: mol_type = other RNA
catttaaaacagtatataaa

SEQ ID NO: 9941 - RNA, 20 nt, synthetic construct
  source 1..20: mol_type = other RNA
gcatttaaaacagtatataa

SEQ ID NO: 9942 - RNA, 20 nt, synthetic construct
  source 1..20: mol_type = other RNA
ttaaaacagtatataaagga

SEQ ID NO: 9943 - RNA, 20 nt, synthetic construct
  source 1..20: mol_type = other RNA
tttaaaacagtatataaagg

SEQ ID NO: 9944 - RNA, 20 nt, synthetic construct
  source 1..20: mol_type = other RNA
atttaaaacagtatataaag

SEQ ID NO: 9945 - RNA, 20 nt, synthetic construct
  source 1..20: mol_type = other RNA
agcatttaaaacagtatata

SEQ ID NO: 9946 - RNA, 20 nt, synthetic construct
  source 1..20: mol_type = other RNA
cggggacctgggcctggcca

SEQ ID NO: 9947 - RNA, 20 nt, synthetic construct
  source 1..20: mol_type = other RNA
atcggggacctgggcctggc

SEQ ID NO: 9948 - RNA, 20 nt, synthetic construct
  source 1..20: mol_type = other RNA
tcggggacctgggcctggcc

SEQ ID NO: 9949 - RNA, 20 nt, synthetic construct
  source 1..20: mol_type = other RNA
ggggacctgggcctggccac

SEQ ID NO: 9950 - RNA, 20 nt, synthetic construct
  source 1..20: mol_type = other RNA
gggacctgggcctggccacg

SEQ ID NO: 9951 - RNA, 20 nt, synthetic construct
  source 1..20: mol_type = other RNA
cgggatctcaagtgcgacaa

SEQ ID NO: 9952 - RNA, 20 nt, synthetic construct
  source 1..20: mol_type = other RNA
caccgggatctcaagtgcga

SEQ ID NO: 9953 - RNA, 20 nt, synthetic construct
  source 1..20: mol_type = other RNA
accgggatctcaagtgcgac

SEQ ID NO: 9954 - RNA, 20 nt, synthetic construct
  source 1..20: mol_type = other RNA
ccgggatctcaagtgcgaca

SEQ ID NO: 9955 - RNA, 20 nt, synthetic construct
  source 1..20: mol_type = other RNA
gggatctcaagtgcgacaat

SEQ ID NO: 9956 - RNA, 20 nt, synthetic construct
  source 1..20: mol_type = other RNA
gtgcgacaatgtctttatca

SEQ ID NO: 9957 - RNA, 20 nt, synthetic construct
  source 1..20: mol_type = other RNA
tgcgacaatgtctttatcac

SEQ ID NO: 9958 - RNA, 20 nt, synthetic construct
  source 1..20: mol_type = other RNA
gcgacaatgtctttatcacg

SEQ ID NO: 9959 - RNA, 20 nt, synthetic construct
  source 1..20: mol_type = other RNA
cgacaatgtctttatcacgg

SEQ ID NO: 9960 - RNA, 20 nt, synthetic construct
  source 1..20: mol_type = other RNA
gacaatgtctttatcacggg

SEQ ID NO: 9961 - RNA, 20 nt, synthetic construct
  source 1..20: mol_type = other RNA
acaatgtctttatcacggga

SEQ ID NO: 9962 - RNA, 20 nt, synthetic construct
  source 1..20: mol_type = other RNA
tccttcaagacggtgtatcg

SEQ ID NO: 9963 - RNA, 20 nt, synthetic construct
  source 1..20: mol_type = other RNA
ccttcaagacggtgtatcga

SEQ ID NO: 9964 - RNA, 20 nt, synthetic construct
  source 1..20: mol_type = other RNA
cttcaagacggtgtatcgag

SEQ ID NO: 9965 - RNA, 20 nt, synthetic construct
  source 1..20: mol_type = other RNA
ctccttcaagacggtgtatc

SEQ ID NO: 9966 - RNA, 20 nt, synthetic construct
  source 1..20: mol_type = other RNA
ttcaagacggtgtatcgagg

SEQ ID NO: 9967 - RNA, 20 nt, synthetic construct
  source 1..20: mol_type = other RNA
tcaagacggtgtatcgaggg

SEQ ID NO: 9968 - RNA, 20 nt, synthetic construct
  source 1..20: mol_type = other RNA
agcagactttggtttagcaa

SEQ ID NO: 9969 - RNA, 20 nt, synthetic construct
  source 1..20: mol_type = other RNA
tagcagactttggtttagca

SEQ ID NO: 9970 - RNA, 20 nt, synthetic construct
  source 1..20: mol_type = other RNA
cagactttggtttagcaagg

SEQ ID NO: 9971 - RNA, 20 nt, synthetic construct
  source 1..20: mol_type = other RNA
gcagactttggtttagcaag

SEQ ID NO: 9972 - RNA, 20 nt, synthetic construct
  source 1..20: mol_type = other RNA
atagcagactttggtttagc

SEQ ID NO: 9973 - RNA, 20 nt, synthetic construct
  source 1..20: mol_type = other RNA
gagatcttcgggctgctaat

SEQ ID NO: 9974 - RNA, 20 nt, synthetic construct
  source 1..20: mol_type = other RNA
cgagatcttcgggctgctaa

SEQ ID NO: 9975 - RNA, 20 nt, synthetic construct
  source 1..20: mol_type = other RNA
ccgagatcttcgggctgcta

SEQ ID NO: 9976 - RNA, 20 nt, synthetic construct
  source 1..20: mol_type = other RNA
accgagatcttcgggctgct

SEQ ID NO: 9977 - RNA, 20 nt, synthetic construct
  source 1..20: mol_type = other RNA
caccgagatcttcgggctgc

SEQ ID NO: 9978 - RNA, 20 nt, synthetic construct
  source 1..20: mol_type = other RNA
gctgctaatattcttgtagg

SEQ ID NO: 9979 - RNA, 20 nt, synthetic construct
  source 1..20: mol_type = other RNA
ctaatattcttgtaggagaa

SEQ ID NO: 9980 - RNA, 20 nt, synthetic construct
  source 1..20: mol_type = other RNA
gctaatattcttgtaggaga

SEQ ID NO: 9981 - RNA, 20 nt, synthetic construct
  source 1..20: mol_type = other RNA
tgctaatattcttgtaggag

SEQ ID NO: 9982 - RNA, 20 nt, synthetic construct
  source 1..20: mol_type = other RNA
ctgctaatattcttgtagga

SEQ ID NO: 9983 - RNA, 20 nt, synthetic construct
  source 1..20: mol_type = other RNA
ggctgctaatattcttgtag

SEQ ID NO: 9984 - RNA, 20 nt, synthetic construct
  source 1..20: mol_type = other RNA
caatcaaaacactaaaacca

SEQ ID NO: 9985 - RNA, 20 nt, synthetic construct
  source 1..20: mol_type = other RNA
gcaatcaaaacactaaaacc

SEQ ID NO: 9986 - RNA, 20 nt, synthetic construct
  source 1..20: mol_type = other RNA
caaaacactaaaaccaggta

SEQ ID NO: 9987 - RNA, 20 nt, synthetic construct
  source 1..20: mol_type = other RNA
tcaaaacactaaaaccaggt

SEQ ID NO: 9988 - RNA, 20 nt, synthetic construct
  source 1..20: mol_type = other RNA
atcaaaacactaaaaccagg

SEQ ID NO: 9989 - RNA, 20 nt, synthetic construct
  source 1..20: mol_type = other RNA
aatcaaaacactaaaaccag

SEQ ID NO: 9990 - RNA, 20 nt, synthetic construct
  source 1..20: mol_type = other RNA
agcaatcaaaacactaaaac

SEQ ID NO: 9991 - RNA, 20 nt, synthetic construct
  source 1..20: mol_type = other RNA
agcgactttggcctctccaa

SEQ ID NO: 9992 - RNA, 20 nt, synthetic construct
  source 1..20: mol_type = other RNA
atcagcgactttggcctctc

SEQ ID NO: 9993 - RNA, 20 nt, synthetic construct
  source 1..20: mol_type = other RNA
tcagcgactttggcctctcc

SEQ ID NO: 9994 - RNA, 20 nt, synthetic construct
  source 1..20: mol_type = other RNA
cagcgactttggcctctcca

SEQ ID NO: 9995 - RNA, 20 nt, synthetic construct
  source 1..20: mol_type = other RNA
gcgactttggcctctccaaa

SEQ ID NO: 9996 - RNA, 20 nt, synthetic construct
  source 1..20: mol_type = other RNA
cgtgacctggcggcccgcaa

SEQ ID NO: 9997 - RNA, 20 nt, synthetic construct
  source 1..20: mol_type = other RNA
caccgtgacctggcggcccg

SEQ ID NO: 9998 - RNA, 20 nt, synthetic construct
  source 1..20: mol_type = other RNA
accgtgacctggcggcccgc

SEQ ID NO: 9999 - RNA, 20 nt, synthetic construct
  source 1..20: mol_type = other RNA
ccgtgacctggcggcccgca

SEQ ID NO: 10000 - RNA, 20 nt, synthetic construct
  source 1..20: mol_type = other RNA
gtgacctggcggcccgcaac

SEQ ID NO: 10001 - RNA, 20 nt, synthetic construct
  source 1..20: mol_type = other RNA
gcaacgtcctgctggttaac

SEQ ID NO: 10002 - RNA, 20 nt, synthetic construct
  source 1..20: mol_type = other RNA
ggcccgcaacgtcctgctgg

SEQ ID NO: 10003 - RNA, 20 nt, synthetic construct
  source 1..20: mol_type = other RNA
gcccgcaacgtcctgctggt

SEQ ID NO: 10004 - RNA, 20 nt, synthetic construct
  source 1..20: mol_type = other RNA
cccgcaacgtcctgctggtt

SEQ ID NO: 10005 - RNA, 20 nt, synthetic construct
  source 1..20: mol_type = other RNA
ccgcaacgtcctgctggtta

SEQ ID NO: 10006 - RNA, 20 nt, synthetic construct
  source 1..20: mol_type = other RNA
cgcaacgtcctgctggttaa

SEQ ID NO: 10007 - RNA, 20 nt, synthetic construct
  source 1..20: mol_type = other RNA
ggccatcaaggtgctgaagc

SEQ ID NO: 10008 - RNA, 20 nt, synthetic construct
  source 1..20: mol_type = other RNA
gccatcaaggtgctgaagca

SEQ ID NO: 10009 - RNA, 20 nt, synthetic construct
  source 1..20: mol_type = other RNA
ccatcaaggtgctgaagcag

SEQ ID NO: 10010 - RNA, 20 nt, synthetic construct
  source 1..20: mol_type = other RNA
catcaaggtgctgaagcagg

SEQ ID NO: 10011 - RNA, 20 nt, synthetic construct
  source 1..20: mol_type = other RNA
atcaaggtgctgaagcaggg

SEQ ID NO: 10012 - RNA, 20 nt, synthetic construct
  source 1..20: mol_type = other RNA
tcaaggtgctgaagcagggc

What is claimed is:

1. A method of modifying a nucleotide in a kinase gene on a double-stranded DNA molecule in a mammalian cell so as to modify kinase catalytic activity, the method comprising introducing to the cell a composition comprising
a) a guide RNA molecule comprising a spacer sequence portion comprising any one of SEQ ID NOs: 1-10012; and
b) a fusion protein comprising a Clustered Regularly Interspaced Short Palindromic Repeats (CRISPR) nuclease and a base editing enzyme.

2. The method of claim 1, wherein the base editing enzyme is an adenine deaminase.

3. The method of claim 1, wherein the base editing enzyme is ABE8e.

4. The method of claim 1, wherein the base editing enzyme is a cytosine deaminase, and the fusion protein preferably further comprises an inhibitor of uracil DNA glycosylase (UGI).

5. The method of claim 1, wherein the CRISPR nuclease is a nickase and effects a single-strand break in a strand of the double-stranded DNA molecule, preferably in a strand that the spacer sequence portion of the guide RNA molecule is hybridized to.

6. The method of claim 1, wherein the kinase gene is selected from the group consisting of AAK1, AATK, ABL1, ABL2, ACAD10, ACAD11, ACVR1, ACVR1B, ACVR1C, ACVR2A, ACVR2B, ACVRL1, ADCK1, ADCK2, ADCK5, AKT1, AKT2, AKT3, ALK, ALPK1, ALPK2, ALPK3, AMHR2, ANKK1, ARAF, ATM, ATR, AURKA, AURKB, AURKC, AXL, BLK, BMP2K, BMPR1A, BMPR1B, BMPR2, BMX, BRAF, BRSK1, BRSK2, BTK, BUB1, BUB1B, CASMK1, CASMK1D, CAMK1G, CAMK2A, CAMK2B, CAMK2D, CAMK2G, CAMK4, CAMKK1, CAMKK2, CAMKV, CASK, CDC42BPA, CDC42BPB, CDC42BPG, CDC7, CDK1, CDK10, CDK11A, CDK11B, CDK12, CDK13, CDK14, CDK15, CDK16, CDK17, CDK18, CDK19, CDK2, CDK20, CDK3, CDK4, CDK5, CDK6, CDK7, CDK8, CDK9, CDK1, CDKL2, CDKL3, CDKL4, CDKL5, CHEK1, CHEK2, CHKA, CHKB, CHUK, CILK1, CIT, CLK1, CLK2, CLK3, CLK4, COQ8A, COQ8B, CSF1R, CSK, CSNK1A1, CSNK1A1 L, CSNK1D, CSNK1E, CSNK1G1, CSNK1G2, CSNK1G3, CSNK2A1, CSNK2A2, CSNK2A3, DAPK1, DAPK2, DAPK3, DCLK1, DCLK2, DCLK3, DDR1, DDR2, DMPK, DSTYK, DYRK1A, DYRK1B, DYRK2, DYRK3, DYRK4, EEF2K, EGFR, EIF2AK1, EIF2AK2, EIF2AK3, EIF2AK4, EPHA1, EPHA2, EPHA3, EPHA4, EPHA5, EPHA6, EPHA7, EPHA8, EPHB1, EPHB2, EPHB3, EPHB4, ERBB2, ERBB3, ERBB4, ERN1, ERN2, ETNK1, ETNK2, FAM20A, FAM20B, FAM20C, FER, FES, FGFR1, FGFR2, FGFR3, FGFR4, FGR, FLT1, FLT3, FLT4, FN3K, FN3KRP, FRK, FYN, GAK, GRK1, GRK2, GRK3, GRK4, GRK5, GRK6, GRK7, GSK3A, GSK3B, GUCY2C, GUCY2D, GUCY2F, HASPIN, HCK, HIPK1, HIPK2, HIPK3, HIPK4, HUNK, HYKK, IGF1R, IKBKB, IKBKE, ILK, INSR, INSRR, IP6K1, IP6K2, IP6K3, IPMK, IPPK, IRAK1, IRAK2, IRAK3, IRAK4, ITK, ITPKA, ITPKB, ITPKC, JAK1, JAK2, JAK3, KALRN, KDR, KIT, KSR1, KSR2, LATS1, LATS2, LCK, LIMK1, LIMK2, LMTK2, LMTK3, LRRK1, LRRK2, LTK, LYN, MAK, MAP2K1, MAP2K2, MAP2K3, MAP2K4, MAP2K5, MAP2K6, MAP2K7, MAP3K1, MAP3K10, MAP3K11, MAP3K12, MAP3K13, MAP3K14, MAP3K15, MAP3K19, MAP3K2, MAP3K20, MAP3K21, MAP3K3, MAP3K4, MAP3K5, MAP3K6, MAP3K7, MAP3K8, MAP3K9, MAP4K1, MAP4K2, MAP4K3, MAP4K4, MAP4K5, MAPK1, MAPK10, MAPK11, MAPK12, MAPK13, MAPK14, MAPK15, MAPK3, MAPK4, MAPK6, MAPK7, MAPK8, MAPK9, MAPKAPK2, MAPKAPK3, MAPKAPK5, MARK1, MARK2, MARK3, MARK4, MAST1, MAST2, MAST3, MAST4, MASTL, MATK, MELK, MERTK, MET, MINK1, MKNK1, MKNK2, MLKL, MOK, MOS, MST1R, MTOR, MUSK, MYLK, MYLK2, MYLK3, MYLK4, MYO3A, MYO3B, NEK1, NEK10, NEK11, NEK2, NEK3, NEK4, NEK5, NEK6, NEK7, NEK8, NEK9, NIM1K, NLK, NPR1, NPR2, NRK, NTRK1, NTRK2, NTRK3, NUAK1, NUAK2, OBSCN, OXSR1, PAK1, PAK2, PAK3, PAK4, PAK5, PAK6, PASK, PBK, PDGFRA, PDGFRB, PDIK1L, PDPK1, PEAK1, PEAK3, PHKG1, PHKG2, PI4K2A, PI4K2B, PI4KA, PI4KB, PIK3C2A, PIK3C2B, PIK3C2G, PIK3C3, PIK3CA, PIK3CB, PIK3CD, PIK3CG, PIK3R4, PIKFYVE, PIM1, PIM2, PIM3, PINK1, PIP4K2A, PIP4K2B, PIP4K2C, PIP5K1A, PIP5K1B, PIP5K1C, PIP5KL1, PKDCC, PKMYT1, PKN1, PKN2, PKN3, PLK1, PLK2, PLK3, PLK4, PNCK, POMK, PRAG1, PRKAA1, PRKAA2, PRKACA, PRKACB, PRKACG, PRKCA, PRKCB, PRKCD, PRKCE, PRKCG, PRKCH, PRKCI, PRKCQ, PRKCZ, PRKD1, PRKD2, PRKD3, PRKDC, PRKG1, PRKG2, PRKX, PRPF4B, PSKH1, PSKH2, PTK2, PTK2B, PTK6, PTK7, PXK, RAF1, RET, RIOK1, RIOK2, RIOK3, RIPK1, RIPK2, RIPK3, RIPK4, RNASEL, ROCK1, ROCK2, ROR1, ROR2, ROS1, RPS6KA1, RPS6KA2, RPS6KA3, RPS6KA4, RPS6KA5, RPS6KA6, RPS6KB1, RPS6KB2, RPS6KC1, RPS6KL1, RSKR, RYK, SBK1, SBK2, SBK3, SELENOO, SGK1, SGK2, SGK3, SIK1, SIK2, SIK3, SLK, SMG1, SNRK, SPEG, SRC, SRMS, SRPK1, SRPK2, SRPK3, STK10, STK11, STK16, STK17A, STK17B, STK24, STK25, STK26, STK3, STK31, STK32A, STK32B, STK32C, STK33, STK35, STK36, STK38, STK38L, STK39, STK4, STK40, STKLD1, STYK1, SYK, TAOK1, TAOK2, TAOK3, TBCK, TBK1, TEC, TEK, TESK1, TESK2, TEX14, TGFBR1, TGFBR2, TIE1, TLK1, TLK2, TNIK, TNK1, TNK2, TNNI3K, TP53RK, TRIB1, TRIB2, TRIB3, TRIO, TRPM6, TRPM7, TSSK1B, TSSK2, TSSK3, TSSK4, TSSK6, TTBK1, TTBK2, TTK, TTN, TXK, TYK2, TYRO3, UHMK1, ULK1, ULK2, ULK3, ULK4, VRK1, VRK2, VRK3, WEE1, WEE2, WNK1, WNK2, WNK3, WNK4, YES1, and ZAP70.

7. The method of claim 1, wherein the kinase gene is selected from the group consisting of ATM, PLK4, and CDK9.

8. The method of claim 1, wherein the spacer sequence portion comprises SEQ ID NO: 6982.

9. The method of claim 1, wherein the guide RNA molecule is a single guide RNA (sgRNA) molecule.

10. A modified mammalian cell obtained by the method of claim 1.

11. A composition comprising a guide RNA molecule comprising a spacer sequence portion, wherein the spacer sequence portion comprises any one of SEQ ID NOs: 1-10012.

12. The composition of claim 11, wherein the guide RNA molecule is a crRNA molecule or a sgRNA molecule.

13. The composition of claim 11, wherein the guide RNA molecule is a crRNA molecule and the composition further comprises a tracrRNA molecule that hybridizes to a repeat sequence portion of the crRNA molecule to form a crRNA:tracrRNA complex.

14. The composition of claim 11, wherein the composition further comprises a CRISPR nuclease or a fusion protein comprising a CRISPR nuclease and a base editing enzyme.

15. The composition of claim 14, wherein the CRISPR nuclease is a nickase.

16. A plurality of modified cells, wherein the cells are modified by introducing the composition of claim 11 to the cells.

17. An isogenic cell line generated from a cell isolated from the plurality of modified cells of claim 16.

18. A method of identifying a drug target for use in a combination therapy with a first treatment, the method comprising
i) exposing the plurality of modified cells of claim 16 to the first treatment;
ii) sequencing the spacer sequence portions in the plurality of cells, preferably at a time point 0.5-14 days after the exposure to the first treatment;
iii) determining if each spacer sequence portion was enriched, unchanged, or depleted;
iv) classifying a kinase as a growth-suppressive kinase if a spacer sequence portion targeting the kinase is enriched, and classifying a kinase as an essential kinase if a spacer sequence portion targeting the kinase is depleted; and
v) identifying an essential kinase as a drug target for use in a combination therapy with the first treatment.

19. A method of identifying a drug target, the method comprising
i) sequencing the spacer sequence portions in the plurality of modified cells of claim 16, preferably at a time point 0.5-30 days after the introduction of the CRISPR guide RNA library to the plurality of cells;
ii) determining if each spacer sequence portion was enriched, unchanged, or depleted;
iii) classifying a kinase as a growth-suppressive kinase if a spacer sequence portion targeting the kinase is enriched, and classifying a kinase as an essential kinase if a spacer sequence portion targeting the kinase is depleted; and
iv) identifying an essential kinase as a drug target.

20. A method of identifying a drug target, the method comprising
i) sequencing the spacer sequence portions in the plurality of modified cells of claim 16, preferably at a time point 0.5-30 days after the introduction of the CRISPR guide RNA library to the plurality of cells;
ii) performing single-cell RNA sequencing on a cell of the plurality of modified cells, measuring gene expression levels in the cell; and
identifying a gene whose expression is altered relative to an unmodified cell as a drug target.
